(19) United States
(12) Patent Application Publication
(10) Pub. No.: US 2021/0032612 A1
(43) Pub. Date: Feb. 4, 2021

(54) CRISPR/Cas9 Systems, and Methods of Use Thereof

(71) Applicant: Avellino Lab USA, Inc., Menlo Park, CA (US)

(72) Inventor: Tara Moore, Menlo Park, CA (US)

(73) Assignee: Avellino Lab USA, Inc., Menlo Park, CA (US)

(21) Appl. No.: 16/971,712

(22) PCT Filed: Feb. 22, 2019
(86) PCT No.: PCT/US2019/019313

§ 371 Date: Aug. 21, 2020

Related U.S. Application Data
(60) Provisional application No. 62/634,154, filed on Feb. 22, 2018.
(60) Provisional application No. 62/666,048, filed on May 2, 2018.

(51) Int. Cl. C12N 9/22; C12N 15/113; A61K 38/46; A61K 48/00

(52) U.S. Cl. CPC C12N 9/22; C12N 15/113; C12N 2800/80; A61K 48/005; C12N 2310/20; A61K 38/465

(57) ABSTRACT

The present disclosure relates to Clustered Regularly Interspaced Short Palindromic Repeats (CRISPR)/CRISPR associated protein 9 (Cas9) systems, and methods of use thereof for gene editing or for preventing, ameliorating or treating a disease associated with a gene mutation or single-nucleotide polymorphism (SNP) in a subject.

### FIELD OF THE INVENTION

[0001] The present disclosure relates to Clustered Regularly Interspaced Short Palindromic Repeats (CRISPR)/CRISPR associated protein 9 (Cas9) systems, and methods of use thereof for gene editing or for preventing, ameliorating or treating a disease associated with a gene mutation or single-nucleotide polymorphism (SNP) in a subject.

### BACKGROUND OF THE INVENTION

[0002] The discovery of a simple endogenous bacterial system for catalytically cleaving double-stranded DNA has revolutionized the field of therapeutic gene editing. The Type II Clustered Regularly Interspaced Short Palindromic Repeats (CRISPR)/CRISPR associated protein 9 (Cas9) is a programmable RNA guided endonuclease, which has recently been shown to be effective at gene editing in mammalian cells (Hsu P D, Lander E S, Zhang F. Development and applications of CRISPR-Cas9 for genome engineering. Cell 2014; 157: 1262-1278). This highly specific and efficient RNA-guided DNA endonuclease may be of therapeutic importance in a range of genetic diseases. The CRISPR/Cas9 system relies on a single catalytic protein, Cas9 that is guided to a specific DNA sequence by 2 RNA molecules; the tracrRNA and the crRNA (Hsu P D, Lander E S, Zhang F. Development and applications of CRISPR-Cas9 for genome engineering. Cell 2014; 157: 1262-1278). Combination of the tracrRNA/crRNA into a single guide RNA molecule (sgRNA)(Shalem O, Sanjana N E, Hartenian E, Shi X, Scott D A, Mikkelsen T S et al. Genome-scale CRISPR-Cas9 knockout screening in human cells. Science 2014; 343: 84-87; Wang T, Wei J J, Sabatini D M, Lander E S. Genetic screens in human cells using the CRISPR-Cas9 system. Science 2014; 343: 80-84) has led to the rapid development of gene editing tools potentially specific for any target within the genome. Through the substitution of a nucleotide sequence within the sgRNA, to one complimentary to a chosen target, a highly specific system may be generated in a matter of days. One caveat of this system is that the endonuclease requires a protospacer adjacent motif (PAM), located immediately at the 3′ end of the sgRNA binding site. This PAM sequence is an invariant part of the DNA target but not present in the sgRNA, while its absence at the 3′ end of the genomic target sequence results in the inability of the Cas9 to cleave the DNA target (Westra E R, Semenova E, Datsenko K A, Jackson R N, Wiedenheft B, Severinov K et al. Type I-E CRISPR-cas systems discriminate target from non-target DNA through base pairing-independent PAM recognition. PLoS Genet 2013; 9: e1003742). This distinction is important as the mutation directly in a PAM-specific approach, or nearby SNPs may be targeted. One SNP allele will represent a PAM site, while the other allele does not. This allows us to discriminate between the two chromosomes.

### SUMMARY OF THE INVENTION

[0003] In one aspect, the present disclosure describes the potential of utilizing the PAM-generating mutations in introns of a disease causing gene. For example, the PAM-generating mutations are in adjacent introns of a gene having a disease-causing mutation, and the disease-causing mutation is in exon in between the adjacent introns.

[0004] By utilizing guide sequences that bind adjacent to the PAM sequences in the introns, Cas9 nuclease may cleave a gene at two intronic sites, between which an exon containing a disease-causing mutation exists, thereby eliminating the disease-causing exon and knocking out the mutated allele. In another aspect, the CRISPR/Cas9 system utilizing the PAM-generating mutations or SNPs in introns may be used to treat a disease associated with a gene mutation or single-nucleotide polymorphism (SNP) in a subject, for example, including an autosomal dominant disease associated with a gene mutation or single-nucleotide polymorphism (SNP) in a subject.

[0005] In one aspect, the present disclosure is related to methods of preventing, ameliorating, or treating a disease associated with a gene mutation or single-nucleotide polymorphism (SNP) in a subject, the method comprising administering to the subject an engineered CRISPR/Cas9 system comprising at least one vector comprising at least two different CRISPR targeting RNA (crRNA) sequences or single guide RNA (sgRNA) sequences. In one aspect, the present disclosure is related to methods of preventing, ameliorating, or treating a disease associated with a gene mutation or single-nucleotide polymorphism (SNP) in a subject, comprising administering to the subject an engineered CRISPR/Cas9 system comprising at least one vector comprising (i) a nucleotide molecule encoding Cas9 nuclease; (ii) a first sgRNA comprising a first crRNA sequence that hybridizes to a nucleotide sequence complementary to a first target sequence, the first target sequence being adjacent to the 5′-end of a first protospacer adjacent motif (PAM) at the 3′-end side of a disease-causing mutation or SNP in cis, wherein the first target sequence or the first PAM comprises a first ancestral variation or SNP site; and (iii) a second sgRNA comprising a second crRNA sequence that hybridizes to a nucleotide sequence complementary to a second target sequence, the second target sequence being adjacent to the 5′-end of a second PAM at the 5′ side of the disease-causing mutation or SNP in cis, wherein the second target sequence or the second PAM comprises a second ancestral variation or SNP site, wherein the at least one vector does not have a nucleotide molecule encoding Cas9 nuclease and a sgRNA sequence that naturally occur together.

[0006] In some embodiments, the disease is an autosomal dominant disease. In additional embodiments, the disease is selected from the group consisting of Acropectoral syndrome, Acute intermittent porphyria, Adermatoglyphia, Albright's hereditary osteodystrophy, Arakawa's syndrome II, Aromatase excess syndrome, Autosomal dominant cerebellar ataxia, Axenfeld syndrome, Benign hereditary chorea, Bethlem myopathy, Birt-Hogg-Dubé syndrome, Boomerang dysplasia, Branchio-oto-renal syndrome, Buschke-Ollendorff syndrome, Camurati-Engelmann disease, Central core disease, Collagen disease, Collagenopathy, types II and XI, Congenital distal spinal muscular atrophy, Congenital stromal corneal dystrophy, Costello syndrome, Currarino syndrome, Darier's disease, Glut1 deficiency, Dentatorubral-pallidoluysian atrophy, Dermatopathia pigmentosa reticularis, Dysfibrinogenemia, Transthyretin-related hereditary amyloidosis, Familial atrial fibrillation, Familial hypercholesterolemia, Familial male-limited precocious puberty, Feingold syndrome, Felty's syndrome, Flynn-Aird syndrome, Gardner's syndrome, Gillespie syndrome, Gray platelet syndrome, Greig cephalopolysyndactyly syndrome, Hajdu-Cheney syndrome, Hawkinsinuria, Hay-Wells syndrome, Hereditary elliptocytosis, Hereditary hemorrhagic telangiectasia, Hereditary mucoepithelial dysplasia, Hereditary spherocytosis, Holt-Oram syndrome, Huntington's disease, Huntington's disease-like syndrome, Hypertrophic cardiomyopathy, Hypoalphalipoproteinemia, Hypochondroplasia, Hypodysfibrinogenemia, Jackson-Weiss syndrome, Keratolytic winter erythema, Kniest dysplasia, Kostmann syndrome, Langer-Giedion syndrome, Larsen syndrome, Liddle's syndrome, Marfan syndrome, Marshall syndrome, Medullary cystic kidney disease, Metachondromatosis, Miller-Dieker syndrome, MOMO syndrome, Monilethrix, MonoMAC, Multiple endocrine neoplasia, Multiple endocrine neoplasia type 1, Multiple endocrine neoplasia type 2, Multiple endocrine neoplasia type 2b, Myelokathexis, Myotonic dystrophy, Naegeli-Franceschetti-Jadassohn syndrome, Nail-patella syndrome, Noonan syndrome, Oculopharyngeal muscular dystrophy, Pachyonychia congenital, Pallister-Hall syndrome, PAPA syndrome, Papillorenal syndrome, Parastremmatic dwarfism, Pelger-Huet anomaly, Peutz-Jeghers syndrome, Piebaldism, Platyspondylic lethal skeletal dysplasia, Torrance type, Polydactyly, Popliteal pterygium syndrome, Porphyria cutanea tarda, Pseudoachondroplasia, RASopathy, Reis-Bucklers corneal dystrophy, Romano-Ward syndrome, Rosselli-Gulienetti syndrome, Roussy-Lévy syndrome, Rubinstein-Taybi syndrome, Saethre-Chotzen syndrome, Schmitt Gillenwater Kelly syndrome, Short QT syndrome, Singleton Merten syndrome, Spinal muscular atrophy with lower extremity predominance, Spinocerebellar ataxia, Spinocerebellar ataxia type 1, Spinocerebellar ataxia type 6, Spondyloepimetaphyseal dysplasia-Strudwick type, Spondyloepiphyseal dysplasia congenital, Spondyloperipheral dysplasia, Stickler syndrome, Tietz syndrome, Timothy syndrome, Treacher Collins syndrome, Tricho-dento-osseous syndrome, Tuberous sclerosis, Upington disease, Variegate porphyria, Vitelliform macular dystrophy, Von Hippel-Lindau disease, Von Willebrand disease, Wallis-Zieff-Goldblatt syndrome, WHIM syndrome, White sponge nevus, Worth syndrome, Zaspopathy, Zimmermann-Laband syndrome, and Zori-Stalker-Williams syndrome. In yet additional embodiments, the disease is an autosomal dominant disease of an eye. In further embodiments, the disease may include or excludes corneal dystrophy.

[0007] In some embodiments, the disease-causing mutation or SNP is in an exon of a gene causing the disease. In further embodiments, the first and second PAMs are in different introns surrounding one or more exons containing the disease-causing mutation or SNP.

[0008] In some embodiments, the first PAM comprises the first ancestral variation or SNP site and/or the second PAM comprises the second ancestral variation or SNP site. In some embodiments, the first crRNA sequence comprises the first target sequence, and the second crRNA sequence comprises the second target sequence. In further embodiments, the first crRNA sequence is from 17 to 24 nucleotide long; and/or the second crRNA sequence is from 17 to 24 nucleotide long.

[0009] In some embodiments, the first and/or second PAMs and the Cas9 nuclease are from Streptococcus or Staphylococcus. In additional embodiments, the first and second PAMs are both from Streptococcus or Staphylococcus. In some embodiments, each of the first and second PAMs independently consists of NGG or NNGRRT, wherein N is any of A, T, G, and C, and R is A or G. In some embodiments, the administration comprises injecting the engineered CRISPR/Cas9 system into the subject. In additional embodiments, the administering comprises introducing the engineered CRISPR/Cas9 system into a cell containing and expressing a DNA molecule having the target sequence.

[0010] In some embodiments, the disease is associated with the SNP; the first target sequence or the first PAM comprises the first ancestral SNP site; and/or the second target sequence or the second PAM comprises the second ancestral SNP site. In additional embodiments, the target sequence or the PAM comprises a plurality of mutation or SNP sites. In some embodiments, the subject is human.

[0011] In some embodiments, the methods described herein further comprises, prior to administering to the subject the engineered CRISPR/Cas9 system, obtaining genomic or sequence information of the subject; and selecting the first crRNA sequence and/or the second crRNA sequence based on the genomic or sequence information of the subject. In additional embodiments, the genomic or sequence information of the subject includes whole or partial genome sequence information of the subject.

[0012] In some embodiments, the first crRNA sequence hybridizes to the nucleotide sequence so that the Cas9 nuclease cleaves at a first cleaving site that is adjacent to the first ancestral variation or SNP site; and/or the second crRNA sequence hybridizes to the nucleotide sequence so that the Cas9 nuclease cleaves at a second cleaving site that is adjacent to the second ancestral variation or SNP site. In additional embodiments, the first crRNA sequence hybridizes to the nucleotide sequence so that the Cas9 nuclease cleaves only at the first cleaving site that is adjacent to the first ancestral variation or SNP site; and/or the second crRNA sequence hybridizes to the nucleotide sequence so that the Cas9 nuclease cleaves only at the second cleaving site that is adjacent to the second ancestral variation or SNP site. In further embodiments, the first crRNA sequence is configured to reduce cleaving of the genome of the subject at a site other than a first cleaving site compared to other crRNA sequences hybridizing to the nucleotide sequence complementary to the first target sequences; and/or the second crRNA sequence is configured to reduce cleaving of the genome of the subject at a site other than a second cleaving site compared to other crRNA sequences hybridizing to the nucleotide sequence complementary to the second target sequences. In yet further embodiments, the first crRNA sequence is configured to reduce cleaving of a gene, in trans, that corresponds to a gene causing the disease in cis compared to other crRNA sequences hybridizing to the nucleotide sequence complementary to the first target sequences; and/or the second crRNA sequence is configured to reduce cleaving of a gene, in trans, that corresponds to the gene causing the disease in cis compared to other crRNA sequences hybridizing to the nucleotide sequence complementary to the second target sequences.

[0013] In some embodiments, the selected first crRNA sequence is configured to cause cleaving at a first cleaving site, within genome of the subject, that is adjacent to the first ancestral variation or SNP site; and/or the selected second crRNA sequence is configured to cause cleaving at a second cleaving site, within the genome of the subject, that is adjacent to the second ancestral variation or SNP site. In additional embodiments, the selected first crRNA sequence is configured to cause cleaving only at the first cleaving site; and/or the selected second crRNA sequence is configured to cause cleaving only at the second cleaving site. In further embodiments, the first crRNA sequence hybridizes to the nucleotide sequence complementary to the first target sequence in trans with the disease-causing mutation or SNP, said first target sequence in trans not being adjacent to the 5′-end of a PAM; and/or the second crRNA sequence hybridizes to the nucleotide sequence complementary to the second target sequence in trans with the disease-causing mutation or SNP, said second target sequence not being adjacent to the 5′-end of a PAM.

### BRIEF DESCRIPTION OF THE DRAWINGS

[0014] FIG. 1 illustrates an example of a sgRNA sequence, nucleotide and amino acid sequences of Cas9 nuclease from Streptococcus pyogenes (Spy) and Staphylococcus aureus (Sau).

[0015] FIG. 2 illustrates an example of a dual-cut approach using intronic PAM sites. Two separate guides are introduced, and Cas9 generates a double stranded break (DSB) at two sites. Repair of this doubly cut region will result in an excision of the region between the two breaks. The deletion encompasses the exonic coding region of the gene shown by the yellow boxes in this figure.

[0016] FIG. 3 illustrates an embodiment in which a sgRNA utilizing a flanking SNP within the PAM site is designed in the first intron. Additionally, a sgRNA common to both the wild-type and mutant allele is designed in the second intron. In the wild-type allele the single sgRNA causes NHEJ in the second intron, which may have no functional effect. However, in the mutant allele, the sgRNA utilizing the flanking SNP derived PAM and the common sgRNA result in a large deletion that results in a knockout of the mutant allele.

[0017] FIG. 4 illustrates all SNPs in TGFBI with a MAF of >10% that generate a novel PAM. The numbered boxes indicate the exons within TGFB. The hotspots in TGFBI, where multiple disease-causing mutations are found, are shown by the red boxes. The blue arrows indicate the position of a SNP that generates a novel PAM. The novel PAM is shown for each arrow, with the required variant highlighted in red.

[0018] FIG. 5 depicts experimental results from using an exemplary lymphocyte cell line derived from a patient with a R124H granular corneal dystrophy type 2 mutation that was nucleofected with CRISPR/Cas9 and sgRNA. The guide utilized the novel PAM that is generated by the rs3805700 SNP. This PAM is present on the same chromosome as the patients R124H mutation but does not exist on the wild-type chromosome. Following cell sorting, single clones were isolated to determine whether indels had occurred. Six of the single clones had the unedited wild-type chromosome, indicating stringent allele-specificity of this guide. Four of the isolated clones had the mutant chromosome, and three of these exhibited edits indicating a 75% editing efficiency of the mutant chromosome. Two of the three clones exhibited indels that are frame-shifting. Therefore, at least 66.66% of the edits induced gene disruption.

[0019] FIG. 6 shows the results from a dual-guide approach. Two CRISPR plasmids were transfected into the LCLs, one tagged with mCherry the other tagged with GFP. Positive cells were sorted for both mCherry and GFP, collecting 2.6% of the total population. The cells were then allowed to repair and expand, and the genomic DNA was isolated.

[0020] FIG. 7, on the right, illustrates that using the original clonal isolation of single alleles, a 565 bp deletion encompassing both PAM sites was confirmed. The deletion is shown in red with the PAM sites highlighted in blue. On the left, FIG. 7 also illustrates the two guides cutting at their target sites, the region between these cuts being excised upon repair, and the genomic region after repair.

[0021] FIGS. 8-23 illustrate exemplary common guides in intronic regions of TGFBI gene. FIG. 8 illustrates exemplary guide sequences for intron 1-2 in TGFBI gene. FIG. 9 illustrates exemplary guide sequences for intron 2-3 in TGFBI gene. FIG. 10 illustrates exemplary guide sequences for intron 3-4 in TGFBI gene. FIG. 11 illustrates exemplary guide sequences for intron 4-5 in TGFBI gene. FIG. 12 illustrates exemplary guide sequences for intron 5-6 in TGFBI gene. FIG. 13 illustrates exemplary guide sequences for intron 6-7 in TGFBI gene. FIG. 14 illustrates exemplary guide sequences for intron 7-8 in TGFBI gene. FIG. 15 illustrates exemplary guide sequences for intron 8-9 in TGFBI gene. FIG. 16 illustrates exemplary guide sequences for intron 9-10 in TGFBI gene. FIG. 17 illustrates exemplary guide sequences for intron 10-11 in TGFBI gene. FIG. 18 illustrates exemplary guide sequences for intron 11-12 in TGFBI gene. FIG. 19 illustrates exemplary guide sequences for intron 12-13 in TGFBI gene. FIG. 20 illustrates exemplary guide sequences for intron 13-14 in TGFBI gene. FIG. 21 illustrates exemplary guide sequences for intron 14-15 in TGFBI gene. FIG. 22 illustrates exemplary guide sequences for intron 15-16 in TGFBI gene. FIG. 23 illustrates exemplary guide sequences for intron 16-17 in TGFBI gene.

[0022] FIG. 24 illustrates a flowchart for exemplary personalized gene editing.

### DETAILED DESCRIPTION OF THE INVENTION

[0023] As used throughout, ranges are used as shorthand for describing each and every value that is within the range. Any value within the range can be selected as the terminus of the range. In addition, all references cited herein are hereby incorporated by reference in their entireties for all purposes. In the event of a conflict in a definition in the present disclosure and that of a cited reference, the present disclosure controls.

[0024] In one aspect, the present disclosure is related to methods of preventing, ameliorating, or treating a disease associated with a gene mutation or single-nucleotide polymorphism (SNP) in a subject, comprising administering to the subject an engineered CRISPR/Cas9 system comprising at least one vector comprising (i) a nucleotide molecule encoding Cas9 nuclease; (ii) a first sgRNA comprising a first CRISPR targeting RNA (crRNA) sequence that hybridizes to a nucleotide sequence complementary to a first target sequence, the first target sequence being adjacent to the 5′-end of a first protospacer adjacent motif (PAM) at 3′-end side of a disease-causing mutation or SNP in cis, wherein the first target sequence or the first PAM comprises a first ancestral variation or SNP site; and (iii) a second sgRNA comprising a second crRNA sequence that hybridizes to a nucleotide sequence complementary to a second target sequence, the second target sequence being adjacent to the 5′-end of a second PAM at 5′-end side of the disease-causing mutation or SNP in cis, wherein the second target sequence or the second PAM comprises a second ancestral variation or SNP site, wherein at least one vector does not have a nucleotide molecule encoding Cas9 nuclease and a crRNA sequence that naturally occur together. In another aspect, the present disclosure is related to methods of preventing, ameliorating, or treating a disease associated with a gene mutation or single-nucleotide polymorphism (SNP) in a subject comprising altering expression of the gene product of the subject by the methods described above, wherein the gene comprises a mutant or SNP mutant sequence. In some embodiments, the disease is associated with the SNP; the first target sequence or the first PAM comprises the first ancestral SNP site; and/or the second target sequence or the second PAM comprises the second ancestral SNP site. In additional embodiments, the target sequence comprises a plurality of mutation or SNP sites. In some embodiments, the subject is human. In some embodiments, the first crRNA sequence hybridizes to the nucleotide sequence so that the Cas9 nuclease cleaves at a first cleaving site that is adjacent to the first ancestral variation or SNP site; and/or the second crRNA sequence hybridizes to the nucleotide sequence so that the Cas9 nuclease cleaves at a second cleaving site that is adjacent to the second ancestral variation or SNP site. In additional embodiments, the first crRNA sequence hybridizes to the nucleotide sequence so that the Cas9 nuclease cleaves only at the first cleaving site; and/or the second crRNA sequence hybridizes to the nucleotide sequence so that the Cas9 nuclease cleaves only at the second cleaving site.

[0025] As described herein, being “in cis” with the disease-causing mutation or SNP refers to being on the same molecule of DNA or chromosome as the disease-causing mutation, and being “in trans” with the disease-causing mutation or SNP refers to being on a different molecule of DNA or chromosome as the disease-causing mutation or SNP. In some embodiments, the first crRNA sequence hybridizes to the nucleotide sequence complementary to the first target sequence in trans with the disease-causing mutation or SNP, said first target sequence not being adjacent to the 5′-end of a PAM; and/or the second crRNA sequence hybridizes to the nucleotide sequence complementary to the second target sequence in trans with the disease-causing mutation or SNP, said second target sequence not being adjacent to the 5′-end of a PAM. In the absence of the PAM adjacent to the first and/or second target sequences, the first and/or the second target sequences in trans with the disease-causing mutation or SNP may remain intact without any cleavage (e.g., the Cas9 nuclease does not cleave the first and/or the second target sequences in trans with the disease-causing mutation or SNP). This approach may permit expression of a gene that is in trans with the disease-causing mutation or SNP and does not include a disease-causing mutation or SNP. This approach may also reduce or eliminate any adverse impacts associated with knocking out both the gene that includes the disease-causing mutation or SNP and the gene that does not include the disease-causing mutation or SNP in a subject. In additional embodiments, the first crRNA sequence hybridizes to the nucleotide sequence complementary to the first target sequence in trans with the disease-causing mutation or SNP, said first target sequence not being adjacent to the 5′-end of a PAM; and the second crRNA sequence hybridizes to the nucleotide sequence complementary to the second target sequence in trans with the disease-causing mutation or SNP, said second target sequence being adjacent to the 5′-end of a PAM. In the absence of the PAM adjacent to the first target sequence, the first target sequence in trans with the disease-causing mutation or SNP may remain intact without any cleavage while the second target sequence in trans with the disease-causing mutation or SNP may be cleaved (e.g., the Cas9 nuclease cleaves the first target sequence in trans with the disease-causing mutation or SNP but does not cleave the second target sequence in trans with the disease-causing mutation or SNP). In further embodiments, the first crRNA sequence hybridizes to the nucleotide sequence complementary to the first target sequence in trans with the disease-causing mutation or SNP, said first target sequence being adjacent to the 5′-end of a PAM; and the second crRNA sequence hybridizes to the nucleotide sequence complementary to the second target sequence in trans with the disease-causing mutation or SNP, said second target sequence not being adjacent to the 5′-end of a PAM. In the absence of the PAM adjacent to the second target sequence, the second target sequence in trans with the disease-causing mutation or SNP may remain intact without any cleavage while the first target sequence in trans with the disease-causing mutation or SNP is cleaved (e.g., the Cas9 nuclease cleaves the second target sequence in trans with the disease-causing mutation or SNP but does not cleave the first target sequence in trans with the disease-causing mutation or SNP). Said “nucleotide sequence complementary to the first target sequence in trans with the disease-causing mutation or SNP” herein has the identical nucleotide sequence as the nucleotide sequence complementary to the first target sequence in cis with the disease-causing mutation or SNP. Said “nucleotide sequence complementary to the first target sequence in trans with the disease-causing mutation or SNP” and said “the first target sequence in trans with the disease-causing mutation or SNP,” however, may be located on a different molecule of DNA or chromosome where the same disease-causing mutation or SNP is absent (thus are in trans with the disease-causing mutation or SNP). Similarly, said “nucleotide sequence complementary to the second target sequence in trans with the disease-causing mutation or SNP” herein has the identical nucleotide sequence as the nucleotide sequence complementary to the second target sequence in cis with the disease-causing mutation or SNP. Said “nucleotide sequence complementary to the second target sequence in trans with the disease-causing mutation or SNP” and said “the second target sequence in trans with the disease-causing mutation or SNP,” however, may be located on a different molecule of DNA or chromosome where the disease-causing mutation or SNP is absent (thus are in trans with the disease-causing mutation or SNP).

[0026] In some embodiments, the engineered CRISPR/Cas9 system described herein may comprise at least one vector comprising (i) a nucleotide molecule encoding Cas9 nuclease described herein, and (ii) a plurality of sgRNA targeting intronic sites surrounding one or more exons containing a disease-associate mutation or SNP of interest as described herein. The sgRNA may comprise a target sequence adjacent to the 5′-end of a protospacer adjacent motif (PAM), and/or hybridize to a first target sequence complementary to a second target sequence adjacent to the 5′ end of the PAM. The target sequence or the PAM may comprise the ancestral variation or SNP in an intronic site. In additional embodiments, the ancestral variation or SNP in the intronic site does not cause a disease. In some embodiments, sgRNA may comprise a target sequence adjacent to a PAM site located in the flanking intron that is common to both wild-type and mutant alleles in tandem with a sgRNA adjacent to a PAM site that is specific to the mutant allele. In some embodiments, the Cas9 nuclease and the sgRNA do not naturally occur together. The sequence of this PAM site is specific to the Cas9 nuclease being used. In additional embodiments, the PAM comprises the mutation or SNP site. In yet additional embodiments, the PAM consists of a PAM selected from the group consisting of NGG and NNGRRT, wherein N is any of A, T, G, and C, and R is A or G.

[0027] In some embodiments, the disease-causing mutation or SNP is in an exon of a gene associated with the disease, and the first and second PAMs are in different introns surrounding one or more exons containing the disease-causing mutation or SNP. As shown in FIGS. 2 and 3, first and second CRISPR targeting RNA (crRNA) sequences hybridize to nucleotide sequences complementary to first and second target sequences, the first target sequence being adjacent to the 5′-end of a first protospacer adjacent motif (PAM) at 3′-end side of a disease-causing mutation or SNP in cis, and the second target sequence being adjacent to the 5′-end of a first protospacer adjacent motif (PAM) at 5′-end side of a disease-causing mutation or SNP in cis. Thus, the first and second PAMs are located on opposite sides of one or more exons containing the disease-causing mutation or SNP. As used herein, an “intron” means a section of DNA occurring between two adjacent exons within a gene which is removed during pre-mRNA splicing and does not code for any amino acids constituting the gene product. An “intronic site” is a site within an intron. An “exon” means a section of DNA occurring in a gene which codes for one or more amino acids in the gene product. For example, the constitutively spliced exon known so far has 6 nucleotides or more, and the alternatively spliced exon has 3 nucleotides or more, which is equivalent to 1 or 2 amino acids or more depending on the frame that the mRNA is read in. An “exonic site” is a site within an exon.

[0028] In some embodiments, the first PAM comprises the first mutation or SNP site and/or the second PAM comprises the second mutation or SNP site. In some embodiments, the first crRNA sequence comprises the first target sequence, and the second crRNA sequence comprises the second target sequence. In further embodiments, each of the first crRNA sequence and the second crRNA sequence may independent be from 14, 15, 16, 17, 18, 19, 20, 21, 22, 23, 24 or 25 to 20, 21, 22, 23, 24, 25, 26, 27, 28, 29 or 30 nucleotide long.

[0029] In some embodiments, the methods described herein further comprise identifying targetable mutations or SNPs on either side of disease-causing mutation or SNP to silence the disease-causing mutation or SNP. In some embodiments, a block of DNA is identified in a phased sequencing experiment.

[0030] In some embodiments, the mutation or SNP of interest is not a suitable substrate for the CRISPR/Cas9 system, and identifying mutations or SNPs on both side of the disease-causing mutations or SNP that are suitable for CRISPR/Cas9 cleavage allows removal of a segment of DNA that includes the disease-causing mutations or SNP. In some embodiments, the read length may be increased so as to gain longer contiguous reads and a haplotype phased genome by using a technology described in Weisenfeld N I, Kumar V, Shah P, Church D M, Jaffe D B. Direct determination of diploid genome sequences. Genome research. 2017; 27(5):757-767, which is herein incorporated by reference in its entirety.

[0031] In some embodiments, the methods described herein further comprises, prior to administering to the subject the engineered CRISPR/Cas9 system, obtaining genomic or sequence information of the subject; and selecting the first crRNA sequence and/or the second crRNA sequence based on the genomic or sequence information of the subject. In additional embodiments, the genomic or sequence information of the subject includes whole or partial genome sequence information of the subject.

[0032] The human genome is diploid by nature; every chromosome with the exception of the X and Y chromosomes in males is inherited as a pair, one from the male and one from the female parent. When seeking stretches of contiguous DNA sequence larger than a few thousand base pairs, a determination of inheritance is crucial to understand from which parent these blocks of DNA originate. Longer read sequencing technologies have been utilized in attempts to produce a haplotype-resolved genome sequences, i.e. haplotype phasing. Thus, when investigating the genomic sequence of a particular stretch of DNA longer than 50 kbps, a haplotype phased sequence analysis may be utilized to determine which of the paired chromosomes carries the sequence of interest. Longer phased sequencing reads may be employed to determine whether the SNP of interest would be suitable as a target for the CRISPR/Cas9 gene editing system described herein.

[0033] In some embodiments, the selected first crRNA sequence is configured to cause cleaving at a first cleaving site, within genome of the subject, that is adjacent to the first ancestral variation or snp site; and/or the selected second crRNA sequence is configured to cause cleaving at a second cleaving site, within the genome of the subject, that is adjacent to the second ancestral variation or snp site. In additional embodiments, the selected first crRNA sequence is configured to cause cleaving only at the first cleaving site; and/or the selected second crRNA sequence is configured to cause cleaving only at the second cleaving site. In some embodiments, the selected first crRNA sequence hybridizes to the nucleotide sequence (in trans) complementary to the first target sequence in trans with the disease-causing mutation or SNP, said first target sequence not being adjacent to the 5′-end of a PAM; and/or the selected second crRNA sequence hybridizes to the nucleotide sequence (in trans) complementary to the second target sequence in trans with the disease-causing mutation or SNP, said second target sequence not being adjacent to the 5′-end of a PAM. In additional embodiments, the selected first crRNA sequence hybridizes to the nucleotide sequence (in trans) complementary to the first target sequence in trans with the disease-causing mutation or SNP, said first target sequence not being adjacent to the 5′-end of a PAM; and the selected second crRNA sequence hybridizes to the nucleotide sequence (in trans) complementary to the second target sequence in trans with the disease-causing mutation or SNP, said second target sequence being adjacent to the 5′-end of a PAM. In further embodiments, the selected first crRNA sequence hybridizes to the nucleotide sequence (in trans) complementary to the first target sequence in trans with the disease-causing mutation or SNP, said first target sequence being adjacent to the 5′-end of a PAM; and the selected second crRNA sequence hybridizes to the nucleotide sequence (in trans) complementary to the second target sequence in trans with the disease-causing mutation or SNP, said second target sequence not being adjacent to the 5′-end of a PAM.

[0034] In some embodiments, selecting the first crRNA sequence includes selecting a crRNA sequence that corresponds to the first target sequence in trans, said first target sequence in trans not being adjacent to the 5′-end of a PAM, and/or selecting the second crRNA sequence includes selecting a crRNA sequence that corresponds to the second target sequence in trans, said second target sequence in trans not being adjacent to the 5′-end of a PAM. In some embodiments, selecting the first crRNA sequence includes selecting a crRNA sequence that corresponds to the first target sequence in trans, said first target sequence in trans not being adjacent to the 5′-end of a PAM, and selecting the second crRNA sequence includes selecting a crRNA sequence that corresponds to the second target sequence in trans, said second target sequence in trans being adjacent to the 5′-end of a PAM. In some embodiments, selecting the first crRNA sequence includes selecting a crRNA sequence that corresponds to the first target sequence in trans, said first target sequence in trans being adjacent to the 5′-end of a PAM, and selecting the second crRNA sequence includes selecting a crRNA sequence that corresponds to the second target sequence in trans, said second target sequence in trans not being adjacent to the 5′-end of a PAM.

[0035] In some embodiments, the subjects that can be treated with the methods described herein include, but are not limited to, mammalian subjects such as a mouse, rat, dog, baboon, pig or human. In some embodiments, the subject is a human. The methods can be used to treat subjects at least 1 year, 2 years, 3 years, 5 years, 10 years, 15 years, 20 years, 25 years, 30 years, 35 years, 40 years, 45 years, 50 years, 55 years, 60 years, 65 years, 70 years, 75 years, 80 years, 85 years, 90 years, 95 years or 100 years of age. In some embodiments, the subject is treated for at least one, two, three, or four diseases. For example, a single or multiple crRNA or sgRNA may be designed to alter or delete nucleotides at more than 2, 3, 4, 5, 6, 7, 8, 9 or 10 and/or fewer than 20, 10, 9, 8, 7, 6, 5, 4 or 3 ancestral variation or snp sites.

[0036] In some embodiments, the methods of preventing, ameliorating, or treating the disease in a subject may comprise administering to the subject an effective amount of the engineered CRISPR/Cas9 system described herein. The term “effective amount” or “therapeutically effective amount” refers to the amount of an agent that is sufficient to effect beneficial or desired results. The therapeutically effective amount may vary depending upon one or more of: the subject and disease condition being treated, the weight and age of the subject, the severity of the disease condition, the manner of administration and the like, which can readily be determined by one of ordinary skill in the art. The term also applies to a dose that will provide an image for detection by any one of the imaging methods described herein. The specific dose may vary depending on one or more of: the particular agent chosen, the dosing regimen to be followed, whether it is administered in combination with other compounds, timing of administration, the tissue to be imaged, and the physical delivery system in which it is carried.

[0037] In some embodiments, the administering comprises injecting the engineered CRISPR/Cas9 system into the subject. In additional embodiments, the administering comprises introducing the engineered CRISPR/Cas9 system into a cell containing and expressing a DNA molecule having the target sequence as described below.

[0038] In some embodiments, the methods of treating the disease provide a positive therapeutic response with respect to a disease or condition. By “positive therapeutic response” is intended an improvement in the disease or condition, and/or an improvement in the symptoms associated with the disease or condition. The therapeutic effects of the subject methods of treatment can be assessed using any suitable method. In some embodiments, the subject methods reduce the amount of a disease-associated protein deposition in the subject by at least 5%, 10%, 15%, 20%, 25%, 30%, 35%, 40%, 45%, 50%, 55%, 60%, 65%, 70%, 75%, 80%, 85%, 90%, 95%, or 99% as compared to the subject prior to undergoing treatment.

[0039] In another aspect, the present disclosure is related to engineered Clustered Regularly Interspaced Short Palindromic Repeats (CRISPR)/CRISPR associated protein 9 (Cas9) systems for preventing, ameliorating, or treating a disease associated with a gene mutation or single-nucleotide polymorphism (SNP) in a subject. The CRISPR/Cas9 may comprise at least one vector comprising a nucleotide molecule encoding Cas9 nuclease and the sgRNAs and/or crRNAs as described herein. The terms “non-naturally occurring” or “engineered” are used interchangeably and indicate the involvement of the hand of man. The terms, when referring to nucleic acid molecules or polypeptides mean that the nucleic acid molecule or the polypeptide is at least substantially free from at least one other component with which they are naturally associated in nature and as found in nature. In some embodiments, the Cas9 nuclease and the sgRNA/crRNA do not naturally occur together.

[0040] In general, “CRISPR system” refers collectively to transcripts and other elements involved in the expression of or directing the activity of CRISPR-associated (“Cas”) genes, including sequences encoding a Cas gene, a tracr (trans-activating CRISPR) sequence (e.g., tracrRNA or an active partial tracrRNA), a tracr-mate sequence (encompassing a “direct repeat” and a tracrRNA-processed partial direct repeat in the context of an endogenous CRISPR system), a guide sequence (also referred to as “crRNA” herein, or a “spacer” in the context of an endogenous CRISPR system), and/or other sequences and transcripts from a CRISPR locus. As described above, sgRNA is a combination of at least tracrRNA and crRNA. In some embodiments, one or more elements of a CRISPR system are derived from a type II CRISPR system. In some embodiments, one or more elements of a CRISPR system are derived from a particular organism comprising an endogenous CRISPR system, such as Streptococcus pyogenes or Staphylococcus aureus. In general, a CRISPR system is characterized by elements that promote the formation of a CRISPR complex at the site of a target sequence (also referred to as a protospacer in the context of an endogenous CRISPR system). In the context of formation of a CRISPR complex, “target sequence” may refer to a sequence to which a guide sequence is designed to have complementarity, where hybridization between a target sequence and a guide sequence promotes the formation of a CRISPR complex, the “target sequence” may refer to a sequence adjacent to a PAM site, which the guide sequence comprises. Full complementarity is not necessarily required, provided there is sufficient complementarity to cause hybridization and promote formation of a CRISPR complex. In this disclosure, “target site” refers to a site of the target sequence including both the target sequence and its complementary sequence, for example, in double stranded nucleotides. In some embodiments, the target site described herein may mean a first target sequence hybridizing to sgRNA or crRNA of CRISPR/Cas9 system, and/or a second target sequence adjacent to the 5′-end of a PAM. A target sequence may comprise any polynucleotide, such as DNA or RNA polynucleotides. In some embodiments, a target sequence is located in the nucleus or cytoplasm of a cell. In some embodiments, the target sequence may be within an organelle of a eukaryotic cell, for example, mitochondrion or chloroplast.

[0041] The term “vector” refers to a nucleic acid molecule capable of transporting another nucleic acid to which it has been linked. Vectors include, but are not limited to, nucleic acid molecules that are single-stranded, double-stranded, or partially double-stranded; nucleic acid molecules that comprise one or more free ends, no free ends (e.g., circular); nucleic acid molecules that comprise DNA, RNA, or both; and other varieties of polynucleotides known in the art. One type of vector is a “plasmid,” which refers to a circular double stranded DNA loop into which additional DNA segments can be inserted, such as by standard molecular cloning techniques. Another type of vector is a viral vector, wherein virally-derived DNA or RNA sequences are present in the vector for packaging into a virus (e.g., retroviruses, replication defective retroviruses, adenoviruses, replication defective adenoviruses, and adeno-associated viruses). Viral vectors also include polynucleotides carried by a virus for transfection into a host cell. Certain vectors are capable of autonomous replication in a host cell into which they are introduced (e.g., bacterial vectors having a bacterial origin of replication and episomal mammalian vectors). Other vectors (e.g., non-episomal mammalian vectors) are integrated into the genome of a host cell upon introduction into the host cell, and thereby are replicated along with the host genome. Moreover, certain vectors are capable of directing the expression of genes to which they are operatively-linked. Such vectors are referred to herein as “expression vectors.” Common expression vectors of utility in recombinant DNA techniques are often in the form of plasmids. Recombinant expression vectors can comprise a nucleic acid of the invention in a form suitable for expression of the nucleic acid in a host cell, which means that the recombinant expression vectors include one or more regulatory elements, which may be selected on the basis of the host cells to be used for expression, that is operatively-linked to the nucleic acid sequence to be expressed. Within a recombinant expression vector, “operably linked” is intended to mean that the nucleotide sequence of interest is linked to the regulatory element(s) in a manner that allows for expression of the nucleotide sequence (e.g., in an in vitro transcription/translation system or in a host cell when the vector is introduced into the host cell). Advantageous vectors include lentiviruses and adeno-associated viruses, and types of such vectors can also be selected for targeting particular types of cells.

[0042] In some embodiments, at least one vector of the engineered CRISPR/Cas9 system described herein further comprises (a) a first regulatory element operably linked to the sgRNA that hybridizes with the target sequence described herein, and (b) a second regulatory element operably linked to the nucleotide molecule encoding Cas9 nuclease, wherein components (a) and (b) are located on a same vector or different vectors of the system, the sgRNA targets the target sequence, and the Cas9 nuclease cleaves the DNA molecule. The target sequence may be a nucleotide sequence complementary to from 16 to 25 nucleotides adjacent to the 5′ end of a PAM. Being “adjacent” herein means being within 2 or 3 nucleotides of the site of reference, including being “immediately adjacent,” which means that there is no intervening nucleotides between the immediately adjacent nucleotide sequences and the immediate adjacent nucleotide sequences are within 1 nucleotide of each other. In additional embodiments, the cell is a eukaryotic cell, or a mammalian or human cell, and the regulatory elements are eukaryotic regulators. In further embodiments, the cell is a stem cell described herein. In some embodiments, the Cas9 nuclease is codon-optimized for expression in a eukaryotic cell.

[0043] In some embodiments, the first regulatory element is a polymerase III promoter. In some embodiments, the second regulatory element is a polymerase II promoter. The term “regulatory element” is intended to include promoters, enhancers, internal ribosomal entry sites (IRES), and other expression control elements (e.g., transcription termination signals, such as polyadenylation signals and poly-U sequences). Such regulatory elements are described, for example, in Goeddel, GENE EXPRESSION TECHNOLOGY: METHODS IN ENZYMOLOGY 185, Academic Press, San Diego, Calif. (1990). Regulatory elements include those that direct constitutive expression of a nucleotide sequence in many types of host cell and those that direct expression of the nucleotide sequence only in certain host cells (e.g., tissue-specific regulatory sequences). A tissue-specific promoter may direct expression primarily in a desired tissue of interest, such as muscle, neuron, bone, skin, blood, specific organs (e.g., liver, pancreas), or particular cell types (e.g., lymphocytes). Regulatory elements may also direct expression in a temporal-dependent manner, such as in a cell-cycle dependent or developmental stage-dependent manner, which may or may not also be tissue or cell-type specific. In some embodiments, a vector comprises one or more pol III promoter (e.g., 1, 2, 3, 4, 5, or more pol I promoters), one or more pol II promoters (e.g., 1, 2, 3, 4, 5, or more pol II promoters), one or more pol I promoters (e.g., 1, 2, 3, 4, 5, or more pol I promoters), or combinations thereof. Examples of pol III promoters include, but are not limited to, U6 and H1 promoters. Examples of pol II promoters include, but are not limited to, the retroviral Rous sarcoma virus (RSV) LTR promoter (optionally with the RSV enhancer), the cytomegalovirus (CMV) promoter (optionally with the CMV enhancer) [see, e.g., Boshart et al, Cell, 41:521-530 (1985)], the SV40 promoter, the dihydrofolate reductase promoter, the β-actin promoter, the phosphoglycerol kinase (PGK) promoter, and the EF1a promoter. Also encompassed by the term “regulatory element” are enhancer elements, such as WPRE; CMV enhancers; the R-U5′ segment in LTR of HTLV-I (Mol. Cell. Biol., Vol. 8(1), p. 466-472, 1988); SV40 enhancer; and the intron sequence between exons 2 and 3 of rabbit 3-globin (Proc. Natl. Acad. Sci. USA., Vol. 78(3), p. 1527-31, 1981).

[0044] In some embodiments, the Cas9 nuclease provided herein may be an inducible Cas9 nuclease that is optimized for expression in a temporal or cell-type dependent manner. The first regulatory element may be an inducible promoter that can be linked to the Cas9 nuclease include, but are not limited to, tetracycline-inducible promoters, metallothionein promoters; tetracycline-inducible promoters, methionine-inducible promoters (e.g., MET25, MET3 promoters); and galactose-inducible promoters (GAL1, GAL7 and GAL10 promoters). Other suitable promoters include the ADH1 and ADH2 alcohol dehydrogenase promoters (repressed in glucose, induced when glucose is exhausted and ethanol is made), the CUP1 metallothionein promoter (induced in the presence of Cu²⁺, Zn²⁺), the PHO5 promoter, the CYC1 promoter, the HIS3 promoter, the PGK promoter, the GAPDH promoter, the ADC1 promoter, the TRP1 promoter, the URA3 promoter, the LEU2 promoter, the ENO promoter, the TP1 promoter, and the AOX1 promoter.

[0045] It will be appreciated by those skilled in the art that the design of the expression vector can depend on such factors as the choice of the host cell to be transformed, the level of expression desired, etc. A vector can be introduced into host cells to thereby produce transcripts, proteins, or peptides, including fusion proteins or peptides, encoded by nucleic acids as described herein (e.g., clustered regularly interspersed short palindromic repeats (CRISPR) transcripts, proteins, enzymes, mutant forms thereof, fusion proteins thereof, etc.).

[0046] Exemplary CRISPR/Cas9 systems, sgRNA, crRNA and tracrRNA, and their manufacturing process and use are disclosed in U.S. Pat. No. 8,697,359, U.S. Patent Application Publication Nos. 20150232882, 20150203872, 20150184139, 20150079681, 20150073041, 20150056705, 20150031134, 20150020223, 20140357530, 20140335620, 20140310830, 20140273234, 20140273232, 20140273231, 20140256046, 20140248702, 20140242700, 20140242699, 20140242664, 20140234972, 20140227787, 20140189896, 20140186958, 20140186919, 20140186843, 20140179770, 20140179006, 20140170753, 20140093913, 20140080216, and WO2016049024, all of which are incorporated herein by their entirety.

[0047] In some embodiments, the Cas9 nucleases described herein are known; for example, the amino acid sequence of S. pyogenes Cas9 protein may be found in the SwissProt database under accession number Q99ZW2. The Cas9 nuclease may be a Cas9 homolog or ortholog. Mutant Cas9 nucleases that exhibit improved specificity may also be used (see, e.g., Ann Ran et al. Cell 154(6) 1380-89 (2013), which is herein incorporated by reference in its entirety for all purposes and particularly for all teachings relating to mutant Cas9 nucleases with improved specificity for target nucleic acids). The nucleic acid manipulation reagents can also include a deactivated Cas9 nuclease (dCas9). Deactivated Cas9 binding to nucleic acid elements alone may repress transcription by sterically hindering RNA polymerase machinery. Further, deactivated Cas may be used as a homing device for other proteins (e.g., transcriptional repressor, activators and recruitment domains) that affect gene expression at the target site without introducing irreversible mutations to the target nucleic acid. For example, dCas9 can be fused to transcription repressor domains such as KRAB or SID effectors to promote epigenetic silencing at a target site. Cas9 can also be converted into a synthetic transcriptional activator by fusion to VP16/VP64 or p64 activation domains. In some instances, a mutant Type II nuclease, referred to as an enhanced Cas9 (eCa9) nuclease, is used in place of the wild-type Cas9 nuclease. The enhanced Cas9 has been rationally engineered to improve specificity by weakening non-target binding. This has been achieved by neutralizing positively charged residues within the non-target strand groove (Slaymaker et al., 2016).

[0048] In some embodiments, the Cas9 nucleases direct cleavage of one or both strands at the location of a target sequence, such as within the target sequence and/or within the complement of the target sequence. In some embodiments, the Cas9 nucleases directs cleavage of one or both strands within about 1, 2, 3, 4, 5, 6, 7, 8, 9, 10, 15, 20, 25, 50, 100, 200, 500, or more base pairs from the first or last nucleotide of a target sequence.

[0049] Following directed DNA cleavage by the Cas9 nuclease, there are two modes of DNA repair available to the cell: homology directed repair (HDR) and non-homologous end joining (NHEJ). While seamless correction of the mutation by HDR following Cas9 cleavage close to the mutation site is attractive, the efficiency of this method means that it could only be used for in vitro/ex vivo modification of stem cells or induced pluripotent stem cells (iPSC) with an additional step to select those cells in which repair had taken place and purify those modified cells only. HDR does not occur at a high frequency in cells.

[0050] In some embodiments, the first and/or second PAMs and the Cas9 nuclease described herein are from Streptococcus or Staphylococcus. In additional embodiments, the first and second PAMs are both from Streptococcus or Staphylococcus. In additional embodiments, the Cas9 nuclease is from Streptococcus. In yet additional embodiments, the Cas9 nuclease is from Streptococcus pyogenes, Streptococcus dysgalactiae, Streptococcus canis, Streptococcus equi, Streptococcus iniae, Streptococcus phocae, Streptococcus pseudoporcinus, Streptococcus oralis, Streptococcus pseudoporcinus, Streptococcus infantarius, Streptococcus mutans, Streptococcus agalactiae, Streptococcus caballi, Streptococcus equinus, Streptococcus sp. oral taxon, Streptococcus mitis, Streptococcus gallolyticus, Streptococcus gordonii, or Streptococcus pasteurianus, or variants thereof. Such variants may include D10A Nickase, Spy Cas9-HF1 as described in Kleinstiver et al, 2016 Nature, 529, 490-495, or Spy eCas9 as described in Slaymaker et al., 2016 Science, 351(6268), 84-88. In additional embodiments, the Cas9 nuclease is from Staphylococcus. In yet additional embodiments, the Cas9 nuclease is from Staphylococcus aureus, S. simiae, S. auricularis, S. carnosus, S. condimenti, S. massiliensis, S. piscifermentans, S. simulans, S. capitis, S. caprae, S. epidermidis, S. saccharolyticus, S. devriesei, S. haemolyticus, S. hominis, S. agnetis, S. chromogenes, S. felis, S. delphini, S. hyicus, S. intermedius, S. lutrae, S. microti, S. muscae, S. pseudintermedius, S. rostri, S. schleiferi, S. lugdunensis, S. arlettae, S. cohnii, S. equorum, S. gallinarum, S. kloosii, S. leei, S. nepalensis, S. saprophyticus, S. succinus, S. xylosus, S. fleurettii, S. lentus, S. sciuri, S. stepanovicii, S. vitulinus, S. simulans, S. pasteuri, S. warneri, or variants thereof.

[0051] In further embodiments, the Cas9 nuclease excludes Cas9 nuclease from Streptococcus pyogenes.

[0052] In additional embodiments, the Cas9 nuclease comprises an amino acid sequence having at least about 60, 63, 64, 65, 66, 67, 68, 69, 70, 71, 72, 73, 74, 75, 76, 77, 78, 79, 80, 81, 82, 83, 84, 85, 86, 87, 88, 89, 90, 91, 92, 93, 94, 95, 96, 97, 98, 99 or 100% sequence identity with an amino acid sequence selected from the group consisting of SEQ ID NO: 4 or 8. In additional embodiments, the nucleotide molecule encoding Cas9 nuclease comprises a nucleotide sequence having at least about 60, 63, 64, 65, 66, 67, 68, 69, 70, 71, 72, 73, 74, 75, 76, 77, 78, 79, 80, 81, 82, 83, 84, 85, 86, 87, 88, 89, 90, 91, 92, 93, 94, 95, 96, 97, 98, 99 or 100% sequence identity with a nucleotide sequence selected from the group consisting of SEQ ID NO: 3 or 7. In yet additional embodiments, Cas9 sgRNA sequence may comprises a sequence having at least about 60, 63, 64, 65, 66, 67, 68, 69, 70, 71, 72, 73, 74, 75, 76, 77, 78, 79, 80, 81, 82, 83, 84, 85, 86, 87, 88, 89, 90, 91, 92, 93, 94, 95, 96, 97, 98, 99 or 100% sequence identity with SEQ ID NO: 1 or 5. An exemplary tracrRNA or sgRNA scaffold sequence may comprise a sequence having at least about 60, 63, 64, 65, 66, 67, 68, 69, 70, 71, 72, 73, 74, 75, 76, 77, 78, 79, 80, 81, 82, 83, 84, 85, 86, 87, 88, 89, 90, 91, 92, 93, 94, 95, 96, 97, 98, 99 or 100% sequence identity with SEQ ID NO: 2 or 6.

[0053] In some embodiments, the Cas9 nuclease is an enhanced Cas9 nuclease that has one or more mutations improving specificity of the Cas9 nuclease. In additional embodiments, the enhanced Cas9 nuclease is from a Cas9 nuclease from Streptococcus pyogenes having one or more mutations neutralizing a positively charged groove, positioned between the HNH, RuvC, and PAM-interacting domains in the Cas9 nuclease. In yet additional embodiments, the Cas9 nuclease comprises an amino acid sequence having at least about 60, 61, 62, 63, 64, 65, 66, 67, 68, 69, 70, 71, 72, 73, 74, 75, 76, 77, 78, 79, 80, 81, 82, 83, 84, 85, 86, 87, 88, 89, 90, 91, 92, 93, 94, 95, 96, 97, 98, 99 or 100% sequence identity with a mutant amino acid sequence of a Cas9 nuclease from Streptococcus pyogenes (e.g., SEQ ID NO: 4) with one or more mutations selected from the group consisting of (i) K855A, (ii) K810A, K1003A and R1060A, and (iii) K848A, K1003A and R1060A. In yet further embodiments, the nucleotide molecule encoding Cas9 nuclease comprises a nucleotide sequence having at least about 60, 61, 62, 63, 64, 65, 66, 67, 68, 69, 70, 71, 72, 73, 74, 75, 76, 77, 78, 79, 80, 81, 82, 83, 84, 85, 86, 87, 88, 89, 90, 91, 92, 93, 94, 95, 96, 97, 98, 99 or 100% sequence identity with a nucleotide sequence encoding the mutant amino acid sequence.

[0054] In some embodiments, the CRISPR/Cas9 system and the methods using the CRISPR/Cas9 system described herein alter a DNA sequence by the NHEJ. In additional embodiments, the CRISPR/Cas9 system or the vector described herein does not include a repair nucleotide molecule. In some embodiments, the methods described herein alter a DNA sequence by the HDR. In some embodiments, the CRISPR/Cas9 system or the vector described herein may further comprise a repair nucleotide molecule. The target polynucleotide cleaved by the Cas9 nuclease may be repaired by homologous recombination with the repair nucleotide molecule, which is an exogenous template polynucleotide. This repair may result in a mutation comprising an insertion, deletion, or substitution of one or more nucleotides of said target polynucleotide. The repair nucleotide molecule introduces a specific allele (e.g., a wild-type allele) into the genome of one or more cells of the plurality of stem cells upon repair of a Type II nuclease induced DSB through the HDR pathway. In some embodiments, the repair nucleotide molecule is a single stranded DNA (ssDNA). In other embodiments, the repair nucleotide molecule is introduced into the cell as a plasmid vector. In some embodiments, the repair nucleotide molecule is 20 to 25, 25 to 30, 30 to 35, 35 to 40, 40 to 45, 45 to 50, 50 to 55, 55 to 60, 60 to 65, 65 to 70, 70 to 75, 75 to 80, 80 to 85, 85 to 90, 90 to 95, 95 to 100, 100 to 105, 105 to 110, 110 to 115, 115 to 120, 120 to 125, 125 to 130, 130 to 135, 135 to 140, 140 to 145, 145 to 150, 150 to 155, 155 to 160, 160 to 165, 165 to 170, 170 to 175, 175 to 180, 180 to 185, 185 to 190, 190 to 195, or 195 to 200 nucleotides in length. In some embodiments, the repair nucleotide molecule is 200 to 300, 300, to 400, 400 to 500, 500 to 600, 600 to 700, 700 to 800, 800 to 900, 900 to 1,000 nucleotides in length. In other embodiments, the repair nucleotide molecule is 1,000 to 2,000, 2,000 to 3,000, 3,000 to 4,000, 4,000 to 5,000, 5,000 to 6,000, 6,000 to 7,000, 7,000 to 8,000, 8,000 to 9,000, or 9,000 to 10,000 nucleotides in length.

[0055] The repair nucleotide molecule may further include a label for identification and sorting of cells described herein containing the specific mutation. Exemplary labels that can be included with the repair nucleotide molecule include fluorescent labels and nucleic acid barcodes that are identifiable by length or sequence.

[0056] In additional embodiments, the CRISPR/Cas9 system or the vector described herein may include at least one nuclear localization signal (NLS). In additional embodiments, the sgRNA and the Cas9 nuclease are included on the same vector or on different vectors.

[0057] The term “crRNA” may refer to a guide sequence that may be a part of an sgRNA in an CRISPR/Cas9 system. In some embodiments, at least one of the first and second crRNA sequences described herein comprises a nucleotide sequence selected from the group consisting of sequences listed in FIGS. 8-23; and/or at least one of the first and second crRNA sequences comprises a nucleotide sequence selected from the group consisting of sequences listed in Table 2. The term, “sgRNA” refers to a single guide RNA containing (i) a guide sequence (crRNA sequence) and (ii) a Cas9 nuclease-recruiting sequence (tracrRNA). The crRNA sequence may be a sequence that is homologous to a region in your gene of interest and may direct Cas9 nuclease activity. The crRNA sequence and tracrRNA sequence may not naturally occur together. The sgRNA may be delivered as RNA or by transforming with a plasmid with the sgRNA-coding sequence (sgRNA gene) under a promoter. The tracrRNA sequence may be any sequence for tracrRNA for CRISPR/Cas9 system known in the art.

[0058] In some embodiments, the crRNA hybridizes to at least a part of a target sequence (e.g., target genome sequence), and the crRNA may have a complementary sequence to the target sequence. In some embodiments, the target sequence herein is a first target sequence that hybridizes to a second target sequence adjacent to a PAM site described herein. In some embodiments, the crRNA may comprise the first target sequence or the second target sequence. In additional embodiments, the first and second target sequences are located in introns of a target gene. “Complementarity” refers to the ability of a nucleic acid to form hydrogen bond(s) with another nucleic acid sequence by either traditional Watson-Crick or other non-traditional types. A percent complementarity indicates the percentage of residues in a nucleic acid molecule which can form hydrogen bonds (e.g., Watson-Crick base pairing) with a second nucleic acid sequence (e.g., 5, 6, 7, 8, 9, 10 out of 10 being 50%, 60%, 70%, 80%, 90%, and 100% complementary). “Perfectly complementary” means that all the contiguous residues of a nucleic acid sequence will hydrogen bond with the same number of contiguous residues in a second nucleic acid sequence. “Substantially complementary” as used herein refers to a degree of complementarity that is at least about 60%, 65%, 70%, 75%, 80%, 85%, 90%, 95%, 97%, 98%, 99%, or 100% over a region of 8, 9, 10, 11, 12, 13, 14, 15, 16, 17, 18, 19, 20, 21, 22, 23, 24, 25, 30, 35, 40, 45, 50, or more nucleotides, or refers to two nucleic acids that hybridize under stringent conditions. As used herein, “stringent conditions” for hybridization refer to conditions under which a nucleic acid having complementarity to a target sequence predominantly hybridizes with the target sequence, and substantially does not hybridize to non-target sequences. Stringent conditions are generally sequence-dependent, and vary depending on a number of factors. In general, the longer the sequence, the higher the temperature at which the sequence specifically hybridizes to its target sequence. Non-limiting examples of stringent conditions are described in detail in Tijssen (1993), Laboratory Techniques In Biochemistry And Molecular Biology-Hybridization With Nucleic Acid Probes Part 1, Second Chapter “Overview of principles of hybridization and the strategy of nucleic acid probe assay”, Elsevier, N.Y. “Hybridization” refers to a reaction in which one or more polynucleotides react to form a complex that is stabilized via hydrogen bonding between the bases of the nucleotide residues. The hydrogen bonding may occur by Watson Crick base pairing, Hoogstein binding, or in any other sequence specific manner. The complex may comprise two strands forming a duplex structure, three or more strands forming a multi stranded complex, a single self-hybridizing strand, or any combination of these. A hybridization reaction may constitute a step in a more extensive process, such as the initiation of PCR, or the cleavage of a polynucleotide by an enzyme. A sequence capable of hybridizing with a given sequence is referred to as the “complement” of the given sequence. In additional embodiments, the crRNA or the guide sequence is about 17, 18, 19, 20, 21, 22, 23 or 24 nucleotide long. As used herein, the term “about” may refer to a range of values that are similar to the stated reference value. In certain embodiments, the term “about” refers to a range of values that fall within 15, 10, 9, 8, 7, 6, 5, 4, 3, 2, 1 percent or less of the stated reference value.

[0059] In some embodiments, the disease is an autosomal dominant disease. In additional embodiments, the disease is selected from the group consisting of Acropectoral syndrome, Acute intermittent porphyria, Adermatoglyphia, Albright's hereditary osteodystrophy, Arakawa's syndrome II, Aromatase excess syndrome, Autosomal dominant cerebellar ataxia, Axenfeld syndrome, Benign hereditary chorea, Bethlem myopathy, Birt-Hogg-Dubé syndrome, Boomerang dysplasia, Branchio-oto-renal syndrome, Buschke-Ollendorff syndrome, Camurati-Engelmann disease, Central core disease, Collagen disease, Collagenopathy, types II and XI, Congenital distal spinal muscular atrophy, Congenital stromal corneal dystrophy, Costello syndrome, Currarino syndrome, Darier's disease, Glut1 deficiency, Dentatorubral-pallidoluysian atrophy, Dermatopathia pigmentosa reticularis, Dysfibrinogenemia, Transthyretin-related hereditary amyloidosis, Familial atrial fibrillation, Familial hypercholesterolemia, Familial male-limited precocious puberty, Feingold syndrome, Felty's syndrome, Flynn-Aird syndrome, Gardner's syndrome, Gillespie syndrome, Gray platelet syndrome, Greig cephalopolysyndactyly syndrome, Hajdu-Cheney syndrome, Hawkinsinuria, Hay-Wells syndrome, Hereditary elliptocytosis, Hereditary hemorrhagic telangiectasia, Hereditary mucoepithelial dysplasia, Hereditary spherocytosis, Holt-Oram syndrome, Huntington's disease, Huntington's disease-like syndrome, Hypertrophic cardiomyopathy, Hypoalphalipoproteinemia, Hypochondroplasia, Hypodysfibrinogenemia, Jackson-Weiss syndrome, Keratolytic winter erythema, Kniest dysplasia, Kostmann syndrome, Langer-Giedion syndrome, Larsen syndrome, Liddle's syndrome, Marfan syndrome, Marshall syndrome, Medullary cystic kidney disease, Metachondromatosis, Miller-Dieker syndrome, MOMO syndrome, Monilethrix, MonoMAC, Multiple endocrine neoplasia, Multiple endocrine neoplasia type 1, Multiple endocrine neoplasia type 2, Multiple endocrine neoplasia type 2b, Myelokathexis, Myotonic dystrophy, Naegeli-Franceschetti-Jadassohn syndrome, Nail-patella syndrome, Noonan syndrome, Oculopharyngeal muscular dystrophy, Pachyonychia congenital, Pallister-Hall syndrome, PAPA syndrome, Papillorenal syndrome, Parastremmatic dwarfism, Pelger-Huet anomaly, Peutz-Jeghers syndrome, Piebaldism, Platyspondylic lethal skeletal dysplasia, Torrance type, Polydactyly, Popliteal pterygium syndrome, Porphyria cutanea tarda, Pseudoachondroplasia, RASopathy, Reis-Bucklers corneal dystrophy, Romano-Ward syndrome, Rosselli-Gulienetti syndrome, Roussy-Lévy syndrome, Rubinstein-Taybi syndrome, Saethre-Chotzen syndrome, Schmitt Gillenwater Kelly syndrome, Short QT syndrome, Singleton Merten syndrome, Spinal muscular atrophy with lower extremity predominance, Spinocerebellar ataxia, Spinocerebellar ataxia type 1, Spinocerebellar ataxia type 6, Spondyloepimetaphyseal dysplasia-Strudwick type, Spondyloepiphyseal dysplasia congenital, Spondyloperipheral dysplasia, Stickler syndrome, Tietz syndrome, Timothy syndrome, Treacher Collins syndrome, Tricho-dento-osseous syndrome, Tuberous sclerosis, Upington disease, Variegate porphyria, Vitelliform macular dystrophy, Von Hippel-Lindau disease, Von Willebrand disease, Wallis-Zieff-Goldblatt syndrome, WHIM syndrome, White sponge nevus, Worth syndrome, Zaspopathy, Zimmermann-Laband syndrome, and Zori-Stalker-Williams syndrome. In yet additional embodiments, the disease is an autosomal dominant disease of an eye. In further embodiments, the disease may include or excludes corneal dystrophy.

[0060] As used herein, a “corneal dystrophy” refers to any one of a group of hereditary disorders in the outer layer of the eye (cornea). For example, the corneal dystrophy may be characterized by bilateral abnormal deposition of substances in the cornea. Corneal dystrophies include, but are not limited to the following four IC3D categories of corneal dystrophies (see, e.g., Weiss et al., Cornea 34(2): 117-59 (2015)): epithelial and sub-epithelial dystrophies, epithelial-stromal TGFβI dystrophies, stromal dystrophies and endothelial dystrophies. In some embodiments, the corneal dystrophy is selected from the group consisting of Epithelial basement membrane dystrophy (EBMD), Meesmann corneal dystrophy (MECD), Thiel-Behnke corneal dystrophy (TBCD), Lattice corneal dystrophy (LCD), Granular corneal dystrophy (GCD), and Schnyder corneal dystrophy (SCD). In additional embodiments, the corneal dystrophy is caused by one or more mutations, including SNP, is located in a gene selected from the group consisting of Transforming growth factor, beta-induced (TGFBI), keratin 3 (KRT3), keratin 12 (KRT12), GSN, and UbiA prenyltransferase domain containing 1 (UBIAD1). In further embodiments, the mutation or SNP site results in encoding a mutant amino acid in a mutant protein as shown herein. In further embodiments, a mutant sequence comprising the mutation or SNP site encodes a mutant protein selected from the group consisting of (i) mutant TGFBI proteins comprising a mutation corresponding to Leu509Arg, Arg666Ser, Gly623Asp, Arg555Gln, Arg124Cys, Val505Asp, Ile522Asn, Leu569Arg, His572Arg, Arg496Trp, Pro501Thr, Arg514Pro, Phe515Leu, Leu518Pro, Leu518Arg, Leu527Arg, Thr538Pro, Thr538Arg, Val539Asp, Phe540del, Phe540Ser, Asn544Ser, Ala546Thr, Ala546Asp, Phe547Ser, Pro551Gln, Leu558Pro, His572del, Gly594Val, Val613del, Val613Gy, Met619Lys, Ala620Asp, Asn622His, Asn622Lys, Asn622Lys, Gly623Arg, Gly623Asp, Val624_Val625del, Val624Met, Val625Asp, His626Arg, His626Pro, Val627SerfsX44, Thr629_Asn630insAsnValPro, Val631Asp, Arg666Ser, Arg555Trp, Arg124Ser, Asp123delins, Arg124His, Arg124Leu, Leu509Pro, Leu103_Ser104del, Vall13Ile, Asp123His, Arg124Leu, and/or Thr125_Glul26del in TGFBI, for example, of Protein Accession No. Q15582; (ii) mutant KRT3 proteins comprising a mutation corresponding to Glu498Val, Arg503Pro, and/or Glu509Lys in Keratin 3 protein, for example, of Protein Accession No. P12035 or NP_476429.2; (iii) mutant KRT12 proteins with Met129Thr, Met129Val, Gln130Pro, Leul32Pro, Leul32Va, Leul32His, Asn133Lys, Arg135Gly, Arg135Ile, Arg135Thr, Arg135Ser, Ala137Pro, Leul40Arg, Val143Leu, Val143Leu, Lle391_Leu399dup, Ile 426Val, Ile 426Ser, Tyr429Asp, Tyr429Cys, Arg430Pro, and/or Leu433Arg in KRT12, for example, of Protein Accession No. Q99456.1 or NP_000214.1; (iv) mutant GSN proteins with Asp214Tyr in GSN, for example, of Protein Accession No. P06396; and (v) mutant UBIAD1 proteins comprising a mutation corresponding to Ala97Thr, Gly98Ser, Asn102Ser, Asp112Asn, Asp112Gly, Asp118Gly, Arg119Gly, Leul21Val, Leul21Phe, Val22Glu, Val122Gly, Ser17IPro, Tyr174Cys, Thr175Ile, Gly177Arg, Lys181Arg, Gly186Arg, Leui88His, Asn232Ser, Asn233His, Asp236Glu, and/or Asp240Asn in UBIADI, for example, of Protein Accession No. Q9Y5Z9. For example, a mutant sequence comprising the mutation or SNP site encodes at least a part of mutant TGFBI protein mutated by replacing Leu with Arg at amino acid position corresponding the amino acid position 509 of Protein Accession No. Q15582. In this case, a mutation at the mutation or SNP site may be responsible for encoding the mutant amino acid at amino acid position corresponding the amino acid position 509 of Protein Accession No. Q15582. As used herein, a mutation “corresponding to” a particular mutation in a human protein may include a mutation in a different species that occur at the corresponding site of the particular mutation of the human protein. Also as used herein, when a mutant protein is described to include a particular mutant, for example, of Leu509Arg, such a mutant protein may comprise any mutation that occurs at a mutant site corresponding to the particular mutant in a relevant human protein, for example, in TGFBI protein of Protein Accession No. Q15582 as described herein.

[0061] In another aspect, the present disclosure is also related to methods of altering expression of at least one gene product comprising introducing the engineered CRISPR/Cas9 system described herein into a cell containing and expressing a DNA molecule having a target sequence and encoding the gene product. The engineered CRISPR/Cas9 system can be introduced into cells using any suitable method. In some embodiments, the introducing may comprise administering the engineered CRISPR/Cas9 system described herein to cells in culture, or in a host organism.

[0062] Exemplary methods for introducing the engineered CRISPR/Cas9 system include, but are not limited to, transfection, electroporation and viral-based methods. In some cases, the one or more cell uptake reagents are transfection reagents. Transfection reagents include, for example, polymer based (e.g., DEAE dextran) transfection reagents and cationic liposome-mediated transfection reagents. Electroporation methods may also be used to facilitate uptake of the nucleic acid manipulation reagents. By applying an external field, an altered transmembrane potential in a cell is induced, and when the transmembrane potential net value (the sum of the applied and the resting potential difference) is larger than a threshold, transient permeation structures are generated in the membrane and electroporation is achieved. See, e.g., Gehl et al., Acta Physiol. Scand. 177:437-447 (2003). The engineered CRISPR/Cas9 system also may be delivered through viral transduction into the cells. Suitable viral delivery systems include, but are not limited to, adeno-associated virus (AAV), retroviral and lentivirus delivery systems. Such viral delivery systems are useful in instances where the cell is resistant to transfection. Methods that use a viral-mediated delivery system may further include a step of preparing viral vectors encoding the nucleic acid manipulation reagents and packaging of the vectors into viral particles. Other method of delivery of nucleic acid reagents include, but are not limited to, lipofection, nucleofection, microinjection, biolistics, virosomes, liposomes, immunoliposomes, polycation or lipid:nucleic acid conjugates, naked DNA, artificial virions, and agent-enhanced uptake of nucleic acids. See, also Neiwoehner et al., Nucleic Acids Res. 42:1341-1353 (2014), and U.S. Pat. Nos. 5,049,386, 4,946,787; and 4,897,355, which are herein incorporated by reference in its entirety for all purposes, and particularly for all teachings relating to reagent delivery systems. In some embodiments, the introduction is performed by non-viral vector delivery systems include DNA plasmids, RNA (e.g., a transcript of a vector described herein), naked nucleic acid, and nucleic acid complexed with a delivery vehicle, such as a liposome. Delivery can be to cells (e.g., in vitro or ex vivo administration) or target tissues (e.g., in vivo administration).

[0063] The cells that have undergone a nucleic acid alteration event (i.e., a “altered” cell) can be isolated using any suitable method. In some embodiments, the repair nucleotide molecule further comprises a nucleic acid encoding a selectable marker. In these embodiments, successful homologous recombination of the repair nucleotide molecule a host stem cell genome is also accompanied by integration of the selectable marker. Thus, in such embodiments, the positive marker is used to select for altered cells. In some embodiments, the selectable marker allows the altered cell to survive in the presence of a drug that otherwise would kill the cell. Such selectable markers include, but are not limited to, positive selectable markers that confer resistance to neomycin, puromycin or hygromycin B. In addition, a selectable marker can be a product that allows an altered cell to be identified visually among a population of cells of the same type, some of which do not contain the selectable marker. Examples of such selectable markers include, but are not limited to the green fluorescent protein (GFP), which can be visualized by its fluorescence; the luciferase gene, which, when exposed to its substrate luciferin, can be visualized by its luminescence; and β-galactosidase (β-gal), which, when contacted with its substrate, produces a characteristic color. Such selectable markers are well known in the art and the nucleic acid sequences encoding these markers are commercially available (see, e.g., Sambrook et al., Molecular Cloning: A Laboratory Manual (Cold Spring Harbor Laboratory Press 1989). Methods that employ selectable markers that can be visualized by fluorescence may further be sorted using Fluorescence Activated Cell Sorting (FACS) techniques. Isolated manipulated cells may be used to establish cell lines for transplantation. The isolated altered cells can be cultured using any suitable method to produce a stable cell line.

[0064] In another aspect, the present disclosure is related to methods of treating a disease associated with a gene mutation or single-nucleotide polymorphism (SNP) in a subject in need thereof, comprising: (a) obtaining a plurality of stem cells comprising a nucleic acid mutation in a corneal dystrophy target nucleic acid from the subject; (b) manipulating the nucleic acid mutation in one or more stem cells of the plurality of stem cells to correct the nucleic acid mutation, thereby forming one or more manipulated stem cells; (c) isolating the one or more manipulated stem cells; and (d) transplanting the one or more manipulated stem cells into the subject, wherein manipulating the nucleic acid mutation in the one or more stem cells of the plurality of stem cells includes performing any of the methods of altering expression of a gene product or of preventing, ameliorating, or treating a disease associated with a gene mutation or single-nucleotide polymorphism (SNP) in a subject as described herein.

[0065] The subject methods may include obtaining a plurality of stem cells. Any suitable stem cells can be used for the subject method, depending on the type of the disease to be treated. In certain embodiments, the stem cell is obtained from a heterologous donor. In such embodiments, the stem cells of the heterologous donor and the subject to be treated are donor-recipient histocompatible. In certain embodiments, autologous stem cells are obtained from the subject in need of the treatment for the disease. Obtained stem cells carry a mutation in a gene associated with the particular disease to be treated. Suitable stem cells include, but are not limited to, dental pulp stem cells, hair follicle stem cells, mesenchymal stem cells, umbilical cord lining stem cells, embryonic stem cells, oral mucosal epithelial stem cells and limbal epithelial stem cells.

[0066] Stem cells to be manipulated may include individual isolated stem cells or stem cells from a stem cell line established from the isolated stem cells. Any suitable genetic manipulation method may be used to correct the nucleic acid mutation in the stem cells.

[0067] In another aspect, provided herein are kits comprising the CRISPR/Cas9 system for the treatment of a disease associated with a gene mutation or single-nucleotide polymorphism (SNP). In some embodiments, the kit includes one or more sgRNAs described herein, a Cas9 nuclease and a repair nucleotide molecule that includes a wild-type allele of the mutation to be repaired as described herein. In some embodiments, the kit also includes agents that facilitate uptake of the nucleic acid manipulation by cells, for example, a transfection agent or an electroporation buffer. In some embodiments, the subject kits provided herein include one or more reagents for the detection or isolation of stem cells, for example, labeled antibodies for one or more positive stem cell markers that can be used in conjunction with FACS.

[0068] In another aspect, the present disclosure is related to an sgRNA pair, and a kit comprising the sgRNA pair comprising at least two sgRNAs for CRISPR/Cas9 system to silence a disease-causing mutation or SNP, for example, for preventing, ameliorating or treating a disease associated with a gene mutation or single-nucleotide polymorphism (SNP). In some embodiments, the sgRNA pair comprises an sgRNA comprising a guide sequence for PAM-generating ancestral variation or snp in a target gene, for example, in an intron in cis with a disease-causing mutation or SNP. In additional embodiments, the sgRNA pair comprises an sgRNA comprising a common guide sequence for PAM generating an ancestral SNP in intronic regions of a target gene.

[0069] In some embodiments, the present disclosure is related to an sgRNA pair designed for CRISPR/Cas9 system, the sgRNA pair comprising (i) a first sgRNA comprising (a) a first crRNA sequence for a first protospacer adjacent motif (PAM) generating mutation or single-nucleotide polymorphism (SNP) at 3′-end side of a disease-causing mutation or SNP in cis, and (b) a tracrRNA sequence, in which the first crRNA sequence and the tracrRNA sequence do not naturally occur together; (ii) a second sgRNA comprising (a) a second crRNA guide sequence for a second PAM generating mutation or SNP at 5′-end side of the disease-causing mutation or SNP in cis; (b) a tracrRNA sequence, in which the second crRNA sequence and the tracrRNA sequence do not naturally occur together.

[0070] EXAMPLES The following examples are presented to illustrate various embodiments of the invention. It is understood that such examples do not represent and are not intended to represent exclusive embodiments; such examples serve merely to illustrate the practice of this invention.

[0071] Mutation analysis: Mutations associated with various corneal dystrophies were analyzed to determine which were solely caused by missense mutations or in-frame indels. This analysis indicates that for the majority of K12 and TGFBI disease, nonsense or frameshifting indel mutations are not associated with disease. Furthermore, an analysis of the exome variant database confirmed that any naturally occurring nonsense, frameshifting indels or splice site mutations found in these genes are not reported to be associated with disease in these individuals.

[0072] Mutation analysis revealed that the following corneal-dystrophy genes are suitable for targeted nuclease gene therapy (Table 1).

TABLE 1
Genes and their associated corneal dystrophies that
are suitable for a CRISPR/Cas9 mediated approach.

| Gene | Associated Corneal Dystrophies |
|---|---|
| TGFBI | Avellino corneal dystrophy |
| | Reis-Bücklers corneal dystrophy |
| | Thiel-Behnke corneal dystrophy |
| | Grayson-Wilbrandt corneal dystrophy |
| | Lattice Corneal Dystrophy I & II |
| | Granular Corneal Dystrophy I, II & III |
| | Epithelial Basement Membrane Dystrophy |
| KRT3 | Meesemann Epithelial Corneal Dystrophy |
| KRT12 | Meesemann Epithelial Corneal Dystrophy |
| UBIAD1 | Schnyder corneal dystrophy |

[0073] An investigation of the suitable corneal dystrophy genes was conducted for this report to determine the number of mutations targetable by either a PAM-specific approach or a guide allele-specific approach. A PAM-specific approach requires the disease causing SNP to generate a novel PAM, whilst the allele specific approach involves the design of a guide containing the disease causing SNP. All non-disease causing SNPs in TGFBI that generate a novel PAM with a minor allele frequency (MAF) of >10% were identified and analyzed by the Benchling's online genome-editing design tool. The selection of SNPs with a MAF of >10% may provide a reasonable chance that the SNP resulting in a novel PAM will be found in cis with the disease causing mutation. Being “in cis” with the disease causing mutation refers to being on the same molecule of DNA or chromosome as the disease-causing mutation. The SNP resulting in a novel PAM may be found, for example, in intron or exon in TGFBI gene in cis with the disease-causing mutation. All variants within TGFBI were analyzed to determine whether a novel PAM was created (Table 2).

TABLE 2

The variants within TGFBI that result in a novel PAM that have a MAF of >10%.
The novel PAM is shown with the required variant indicated in red.

| | | | | | | | | Novel PAM | |
|---|---|---|---|---|---|---|---|---|---|
| | | | Region Start | Region | Variant | | | (Required | |
| Region | Number | Position | Co- | End Co- | Co-ordinate | SNP | Variant | variant | Guide Sequence |
| Exon | 1 | | 136,028,895 | 136,029,189 | | | | | |
| Intron | 1 to 2 | Intronic variant, | 136 029 190 | 136 033 762 | 136,032,206- | rs756462 | T/C | ccc | GAATCCATGTAAGGATCTAG |
| | | 1507 bp away from exon 2 | | | | | | | |
| Exon | 2 | | 136,033,861 | 136,033,861 | | | | | |
| Intron | 2 to 3 | Intronic variant, | 136,033,862 | 136,044,057 | 136,042,063- | rs1989972 | A/C | atccca | CAGGGCTGTATTACTGGGGC |
| | | 1945 bp away from exon 3 | | | | | | | |
| | | Intronic variant, | | | | rs1989972 | A/C | cca | CAGGGCTGTATTACTGGGGC |
| | | 1945 bp away from exon 3 | | | | | | | |
| | | Intronic variant, | | | | rs1989972 | A/C | ccc | AGGGCTGTATTACTGGGGCT |
| | | 1945 bp away from exon 3 | | | | | | | |
| | | Intronic variant, | | | 136,043,042- | rs3805700 | A/G | agg | ATTCATATAGAAGAAAGGAA |
| | | 966 bp away from exon 3 | | | | | | | |
| Exon | 3 | | 136,044,058 | 136,044,122 | | | | | |
| Intron | 3 to 4 | | 136,044,123 | 136,046,334 | | | | | |
| Exon | 4 | | 136,046,335 | 136,046,495 | | | | | |
| Intron | 4 to 5 | | 136,046,496 | 136,046,850 | | | | | |
| Exon | 5 | | 136,046,851 | 136,047,015 | | | | | |
| Intron | 5 to 6 | | 136,047,016 | 136,047,273 | | | | | |
| Exon | 6 | Synonymous variant, | 136,047,274 | 136,047,420 | 136,047,250- | rs1442 | G/C | CCT | TTGCATGGTGGTCGGCTTTC |
| | | protein position 217 | | | | | | | |
| Intron | 6 to 7 | Intronic variant, | 136,047,421 | 136,049,438 | 136,047,489- | rs764567 | A/G | cgg | TCCTGTAGGGGAACATAGAG |
| | | 119 bp away from exon 6 | | | | | | | |
| | | Intronic variant, | | | | rs764567 | A/G | gcgggt | CTCCTGTAGGGGAACATAGA |
| | | 119 bp away from exon 6 | | | | | | | |
| | | Intronic variant, | | | 136,047,368- | rs2073509 | A/G | agg | GTGTGTGGCTGCAGCAGCAC |
| | | 268 bp away from variant | | | | | | | |
| | | Intronic variant, | | | | rs2073509 | T/G | ggg | TGTGTGGCTGCAGCAGCACA |
| | | 268 bp away from variant | | | | | | | |
| | | Intronic variant, | | | | rs2073509 | T/G | cagggt | GGTGTGTGGCTGCAGCAGCA |
| | | 268 bp away from variant | | | | | | | |
| | | Intronic variant, | | | 136,048,154- | rs2073511 | T/C | cct | GGAGAGGAGCTTAGACAGCG |
| | | 784 bp away from variant | | | | | | | |
| | | Intronic variant, | | | 136,048,704- | rs916951 | A/G | cgg | GTAATAGCAAAGGCTCAGGG |
| | | 685 bp from exon 7 | | | | | | | |
| Exon | 7 | | 136,049,439 | 136,049,580 | | | | | |
| Intron | 7 to 8 | Intronic variant, | 136,049,581 | 136,052,906 | 136,050,039- | rs1137550 | T/C | actctg | ATCCGCCCACCTTGTCCTCC |
| | | 509 bp from exon 7 | | | | | | | |
| Exon | 8 | Synonymous variant, | 136,052,907 | 136,053,119 | 136,052,924 | rs1054124 | A/G | TGG | CATCGTTGCGGGGCTGTCTG |
| | | protein position 327 | | | | | | | |
| Intron | 8 to 9 | Intronic variant, | 136,053,120 | 136,053,942 | 136,053,686- | rs6889640 | C/A | actctc | CCAGTCAGGAGGAGAGGGAG |
| | | 207 bp from exon 9 | | | | | | | |
| Exon | 9 | | 136,053,943 | 136,054,080 | | | | | |
| Intron | 9 to 10 | | 136,054,081 | 136,054,715 | | | | | |
| Exon | 10 | | 136,054,716 | 136,054,861 | | | | | |
| Intron | 10 to 11 | Intronic variant, | 136,054,862 | 136,055,679 | 136,055,587- | rs6860369 | A/G | ggg | CAAATCAGGAGGCCCCTCGT |
| | | 43 bp from exon 11 | | | | | | | |
| Exon | 11 | | 136,055,680 | 136,055,816 | | | | | |
| Intron | 11 to 12 | | 136,055,817 | 136,056,664 | | | | | |
| Exon | 12 | | 136,056,665 | 136,056,795 | | | | | |
| Intron | 12 to 13 | Intronic variant, | 136,056,796 | 136,059,089 | 136,057,458- | rs6871571 | A/G | ttgaat | TGCAGCCTGTGTTGGGAGGA |
| | | 713 bp from exon 12 | | | | | | | |
| Exon | 13 | | 136,059,090 | 136,059,214 | | | | | |
| Intron | 13 to 14 | Intronic variant, | 136,059,215 | 136,060,833 | 136,059,694- | rs6893691 | A/G | cgg | AATCTCCCTGGCTGCACCTG |
| | | 530 bp from exon 13 | | | | | | | |
| | | Intronic variant, | | | 136,059,804- | rs1990199 | G/C | cca | TGCATATCTTCCTATGCTCC |
| | | 640 bp from exon 13 | | | | | | | |
| | | Intronic variant, | | | 136,060,125- | rs6894815 | G/C | ccc | GAGACTGAGACTGAAGACAG |
| | | 659 bp from exon 14 | | | | | | | |
| | | Intronic variant, | | | 136,060,553- | rs10064478 | T/G | cgg | TGCCTGTAATCACAGCTACT |
| | | 230 bp from exon 14 | | | | | | | |
| Exon | 14 | | 136,060,834 | 136,060,936 | | | | | |
| Intron | 14 to 15 | Intronic variant, | 136,060,937 | 136,061,499 | 136,060,930- | rs6880837 | T/C | cca | TCTCTCCACCAACTGCCACA |
| | | 44 bp from exon 14 | | | | | | | |
| Exon | 15 | | 136,061,500 | 136,061,579 | | | | | |
| Intron | 15 to 16 | | 136,061,580 | 136,062,662 | | | | | |
| Exon | 16 | | 136,062,663 | 136,062,687 | | | | | |
| Intron | 16 to 17 | | 136,062,688 | 136,063,185 | | | | | |
| Exon | 17 | | 136,063,186 | 136,063,817 | | | | | |

| | | | | | Population Gentics | | | | | |
|---|---|---|---|---|---|---|---|---|---|---|
| | | | | | All | | | East | | South |
| Region | Number | Position | Strand | MAF | Individuals | African | American | Asian | European | Asian |
| Exon | 1 | | | | | | | | | |
| Intron | 1 to 2 | Intronic variant, | − | 0.31 | T: 69% | T: 56% | T: 63% | T: 64% | T: 79% | T: 85% |
| | | 1507 bp away from exon 2 | | | C: 31% | C: 44% | C: 37% | C: 36% | C: 21% | C: 15% |
| Exon | 2 | | | | | | | | | |
| Intron | 2 to 3 | Intronic variant, | − | 0.43 | A: 43% | A: 26% | A: 51% | A: 42% | A: 52% | A: 49% |
| | | 1945 bp away from exon 3 | | | | | | | | |
| | | Intronic variant, | − | 0.43 | A: 43% | A: 26% | A: 51% | A: 42% | A: 52% | A: 49% |
| | | 1945 bp away from exon 3 | | | | | | | | |
| | | Intronic variant, | − | 0.43 | A: 43% | A: 26% | A: 51% | A: 42% | A: 52% | A: 49% |
| | | 1945 bp away from exon 3 | | | C: 57% | C: 74% | C: 49% | C: 58% | C: 48% | C: 51% |
| | | Intronic variant, | + | 0.41 | A: 59% | A: 40% | A: 63% | A: 66% | A: 72% | A: 63% |
| | | 966 bp away from exon 3 | | | G: 41% | G: 60% | G: 37% | G: 34% | G: 28% | G: 37% |
| Exon | 3 | | | | | | | | | |
| Intron | 3 to 4 | | | | | | | | | |
| Exon | 4 | | | | | | | | | |
| Intron | 4 to 5 | | | | | | | | | |
| Exon | 5 | | | | | | | | | |
| Intron | 5 to 6 | | | | | | | | | |
| Exon | 6 | Synonymous variant, | − | 0.32 | C: 32% | C: 3% | C: 45% | C: 37% | C: 47% | C: 40% |
| | | protein position 217 | | | G: 68% | G: 97% | G: 55% | G: 63% | G: 53% | G: 60% |
| Intron | 6 to 7 | Intronic variant, | + | 0.3 | A: 70% | A: 70% | A: 67% | A: 75% | A: 74% | A: 64% |
| | | 119 bp away from exon 6 | | | G: 30% | G: 30% | G: 33% | G: 25% | G: 26% | G 36% |
| | | Intronic variant, | + | 0.3 | A: 70% | A: 70% | A: 67% | A: 75% | A: 74% | A: 64% |
| | | 119 bp away from exon 6 | | | G: 30% | G: 30% | G: 33% | G: 25% | G: 26% | G 36% |
| | | Intronic variant, | + | 0.4 | T: 60% | T: 39% | T: 63% | T: 66% | T: 74% | T: 63% |
| | | 268 bp away from variant | | | G: 40% | G: 61% | G: 37% | G: 34% | G: 26% | G: 37% |
| | | Intronic variant, | + | 0.4 | T: 60% | T: 39% | T: 63% | T: 66% | T: 74% | T: 63% |
| | | 268 bp away from variant | | | G: 40% | G: 61% | G: 37% | G: 34% | G: 26% | G: 37% |
| | | Intronic variant, | + | 0.4 | T: 60% | T: 39% | T: 63% | T: 66% | T: 74% | T: 63% |
| | | 268 bp away from variant | | | G: 40% | G: 61% | G: 37% | G: 34% | G: 26% | G: 37% |
| | | Intronic variant, | − | 0.4 | T: 60% | T: 39% | T: 63% | T: 66% | T: 74% | T: 63% |
| | | 784 bp away from variant | | | C: 40% | C: 61% | C: 37% | C: 34% | C: 26% | C: 37% |
| | | Intronic variant, | + | 0.37 | A: 63% | A: 95% | A: 53% | A: 58% | A: 49% | A: 50% |
| | | 685 bp from exon 7 | | (G) | G: 37% | G: 5% | G: 47% | G: 42% | G: 51% | G: 50% |
| Exon | 7 | | | | | | | | | |
| Intron | 7 to 8 | Intronic variant, | − | 0.37 | T: 63% | T: 52% | T: 64% | T: 66% | T: 74% | T: 63% |
| | | 509 bp from exon 7 | | | C: 37% | C: 48% | C: 36% | C: 34% | C: 26% | C: 37% |
| Exon | 8 | Synonymous variant, | + | 0.39 | A: 61% | A: 46% | A: 64% | A: 66% | A: 74% | A: 63% |
| | | protein position 327 | | | G: 39% | G: 54% | G: 36% | G: 34% | G: 26% | G: 37% |
| Intron | 8 to 9 | Intronic variant, | − | 0.37 | A: 37% | A: 54% | A: 24% | A: 34% | A: 26% | A: 37% |
| | | 207 bp from exon 9 | | | C: 63% | C: 46% | C: 76% | C: 66% | C: 74% | C: 63% |
| Exon | 9 | | | | | | | | | |
| Intron | 9 to 10 | | | | | | | | | |
| Exon | 10 | | | | | | | | | |
| Intron | 10 to 11 | Intronic variant, | + | 0.4 | A: 60% | A: 33% | A: 75% | A: 66% | A: 74% | A: 63% |
| | | 43 bp from exon 11 | | | G: 40% | G: 67% | G: 25% | G: 34% | G: 26% | G: 37% |
| Exon | 11 | | | | | | | | | |
| Intron | 11 to 12 | | | | | | | | | |
| Exon | 12 | | | | | | | | | |
| Intron | 12 to 13 | Intronic variant, | + | 0.42 | A: 58% | A: 76% | A: 63% | A: 66% | A: 74% | A: 63% |
| | | 713 bp from exon 12 | | | G: 42% | G: 24% | G: 37% | G: 34% | G: 26% | G: 37% |
| Exon | 13 | | | | | | | | | |
| Intron | 13 to 14 | Intronic variant, | + | 0.39 | A: 39% | A: 11% | A: 49% | A: 43% | A: 52% | A: 51% |
| | | 530 bp from exon 13 | | | G: 61% | G: 89% | G: 51% | G: 57% | G: 48% | G: 49% |
| | | Intronic variant, | − | 0.39 | C: 61% | C: 89% | C: 51% | C: 57% | C: 48% | C: 49% |
| | | 640 bp from exon 13 | | | G: 39% | G: 11% | G: 49% | G: 43% | G: 52% | G: 51% |
| | | Intronic variant, | − | 0.42 | C: 58% | C: 76% | C: 50% | C: 57% | C: 48% | C: 49% |
| | | 659 bp from exon 14 | | | G: 42% | G: 24% | G: 50% | G: 43% | G: 52% | G: 51% |
| | | Intronic variant, | + | 0.42 | T: 42% | T: 23% | T: 50% | T: 43% | T: 52% | T: 51% |
| | | 230 bp from exon 14 | | | G: 58% | G: 77% | G: 50% | G: 57% | G: 48% | G: 49% |
| Exon | 14 | | | | | | | | | |
| Intron | 14 to 15 | Intronic variant, | − | 0.41 | T: 41% | T: 24% | T: 49% | T: 41% | T: 50% | T: 48% |
| | | 44 bp from exon 14 | | | C: 59% | C: 76% | C: 51% | C: 59% | C: 50% | C: 52% |
| Exon | 15 | | | | | | | | | |
| Intron | 15 to 16 | | | | | | | | | |
| Exon | 16 | | | | | | | | | |
| Intron | 16 to 17 | | | | | | | | | |
| Exon | 17 | | | | | | | | | |

[0074] As shown in FIG. 4, the positions of the variants within TGFBI, with most of the SNPs clustered in introns. Thus, multiple TGFBI mutations located in the hotspots in exons 11, 12 and 14 may be targeted simultaneously using this approach. Therefore, a CRISPR Cas 9 system may target more than one patient or one family with a mutation. One CRISPR/Cas9 system designed in this way may be used to treat a range of TGFBI mutations. The CRISPR/Cas9 system may employ an sgRNA adjacent to a PAM site located in the flanking intron that is common to both wild-type and mutant alleles in tandem with a sgRNA adjacent to a PAM site that is specific to the mutant allele (FIG. 16). This would result in NHEJ in the intron of the wild-type allele that should have no functional effect, while in the mutant allele would result in a deletion encompassing the DNA between the two cut sites. This technique is demonstrated in leucocytes isolated from a patient with a suitable SNP profile.

[0075] Confirming Allele-Specific Indels

[0076] EBV transformation of lymphocytes: A sample of 5 ml of whole blood was taken and place in a sterile 50 ml Falcon tube. An equal volume of RPMI media containing 20% foetal calf serum was added to the whole blood—mix by gently inverting the tube. 6.25 ml of Ficoll-Paque PLUS (GE Healthcare cat no. 17-1440-02) was placed in a separate sterile 50 ml Falcon tube. 10 ml of blood/media mix was added to the Ficoll-Paque. The tube was spun at 2000 rpm for 20 min at room temperature. The red blood cells formed at the bottom of the tube above which was the Ficoll layer. The lymphocytes formed a layer on top of the Ficoll layer, while the top layer was the medium. A clean sterile Pastettewas inserted to draw off the lymphocytes, which were placed in a sterile 15 ml Falcon tube. The lymphocytes were centrifuged and washed. EBV aliquot was thawed and added to resuspended lymphocytes, and the mixture was incubated for 1 hour at 37 degrees C. (infection period). RPMI, 20% FCS media and 1 mg/ml phytohaemagglutinin were added to EBV treated lymphocytes, and the lymphocytes were placed on a 24-well plate.

[0077] Electroporation of EBV Transformed Lymphocytes (LCLs): CRISPR constructs (with either GFP or mCherry co-expressed) were added to suspended EBV transformed lymphocytes cells, and the mixture was transferred to an electroporation cuvette. Electroporation was performed, and 500 μl pre-warmed RPMI 1640 media containing 10% FBS was added to the cuvette. The contents of the cuvette was transferred to a 12 well plate containing the remainder of the pre-warmed media, and 6 hours post nucleofection, 1 ml of media was removed and was replaced with fresh media.

[0078] Cell sorting of GFP+ and/or mCherry+ Live cells: 24 hours post nucleofection, 1 ml of media was removed and the remaining media containing cells was collected in a 1.5 ml Eppendorf. The cells were centrifuged and resuspended in 200 ul PBS add 50 ul eFlouro 780 viability stain at 1:1000 dilution. After another centrifuge, the cells were resuspended in filter sterile FACS buffer containing 1×HBSS (Ca/Mg++ free), 5 mM EDTA, 25 mM HEPES pH 7.0, 5% FCS/FBS (Heat-Inactivated) and 10 units/mL DNase II. Cells were sorted to isolate live GFP+ and/or mCherry+ cells and were collected in RPMI+20% FBS. Cells were expanded, and DNA was extracted from the cells.

[0079] Isolation of single alleles for sequencing: QIAmp DNA Mini Kit (Qiagen) was used to isolate DNA, PCR was used across the region targeted by CRISPR/Cas9. Specific amplification was confirmed by gel electrophoresis, and the PCR product was purified. The PCR product was blunt ended and ligated into pJET1.2/blunt plasmid from the Clonejet Kit (Thermo Scientific). The ligation mixture was transformed into competent DH5a cells. Single colonies were picked, and Sanger Sequencing was performed to confirm edits. The resulting data is shown in FIG. 5.

The application's sequence listing, which the Patent Office published only in electronic form, follows.

SEQUENCE LISTING (4561 sequences)

SEQ ID NO: 1 - RNA, 102 nt, Artificial Sequence
  Description of Artificial Sequence: Synthetic polynucleotide
  modified_base (1)..(20): a, c, u, g, unknown or other
nnnnnnnnnnnnnnnnnnnnguuuuagagcuagaaauagcaaguuaaaauaaggcuaguccguuaucaacuugaaaaaguggcaccgagucggugcuuuuuu

SEQ ID NO: 2 - RNA, 82 nt, Artificial Sequence
  Description of Artificial Sequence: Synthetic oligonucleotide
guuuuagagcuagaaauagcaaguuaaaauaaggcuaguccguuaucaacuugaaaaaguggcaccgagucggugcuuuuuu

SEQ ID NO: 3 - DNA, 3974 bp, Streptococcus pyogenes
atggactataaggaccacgacggagactacaaggatcatgatattgattacaaagacgatgacgataagatggccccaaagaagaagcggaaggtcggtatccacggagtcccagcagccgacaagaagtacagcatcggcctggacatcggcaccaactctgtgggctgggccgtgatcaccgacgagtacaaggtgcccagcaagaaattcaaggtgctgggcaacaccgaccggcacagcatcaagaagaacctgatcggagccctgctgttcgacagcggcgaaacagccgaggccacccggctgaagagaaccgccagaagaagatacaccagacggaagaaccggatctgctatctgcaagagatcttcagcaacgagatggccaaggtggacgacagcttcttccacagactggaagagtccttcctggtggaagaggataagaagcacgagcggcaccccatcttcggcaacatcgtggacgaggtggcctaccacgagaagtaccccaccatctaccacctgagaaagaaactggtggacagcaccgacaaggccgacctgcggctgatctatctggccctggcccacatgatcaagttccggggccacttcctgatcgagggcgacctgaaccccgacaacagcgacgtggacaagctgttcatccagctggtgcagacctacaaccagctgttcgaggaaaaccccatcaacgccagcggcgtggacgccaaggccatcctgtctgccagactgagcaagagcagacggctggaaaatctgatcgcccagctgcccggcgagaagaagaatggcctgttcggaaacctgattgccctgagcctgggcctgacccccaacttcaagagcaacttcgacctggccgaggatgccaaactgcagctgagcaaggacacctacgacgacgacctggacaacctgctggcccagatcggcgaccagtacgccgacctgtttctggccgccaagaacctgtccgacgccatcctgctgagcgacatcctgagagtgaacaccgagatcaccaaggcccccctgagcgcctctatgatcaagagatacgacgagcaccaccaggacctgaccctgctgaaagctctcgtgcggcagcagctgcctgagaagtacaaagagattttcttcgaccagagcaagaacggctacgccggctacattgacggcggagccagccaggaagagttctacaagttcatcaagcccatcctggaaaagatggacggcaccgaggaactgctcgtgaagctgaacagagaggacctgctgcggaagcagcggaccttcgacaacggcagcatcccccaccagatccacctgggagagctgcacgccattctgcggcggcaggaagatttttacccattcctgaaggacaaccgggaaaagatcgagaagatcctgaccttccgcatcccctactacgtgggccctctggccaggggaaacagcagattcgcctggatgaccagaaagagcgaggaaaccatcaccccctggaacttcgaggaagtggtggacaagggcgcttccgcccagagcttcatcgagcggatgaccaacttcgataagaacctgcccaacgagaaggtgctgcccaagcacagcctgctgtacgagtacttcaccgtgtataacgagctgaccaaagtgaaatacgtgaccgagggaatgagaaagcccgccttcctgagcggcgagcagaaaaaggccatcgtggacctgctgttcaagaccaaccggaaagtgaccgtgaagcagctgaaagaggactacttcaagaaaatcgagtgcttcgactccgtggaaatctccggcgtggaagatcggttcaacgcctccctgggcacataccacgatctgctgaaaattatcaaggacaaggacttcctggacaatgaggaaaacgaggacattctggaagatatcgtgctgaccctgacactgtttgaggacagagagatgatcgaggaacggctgaaaacctatgcccacctgttcgacgacaaagtgatgaagcagctgaagcggcggagatacaccggctggggcaggctgagccggaagctgatcaacggcatccgggacaagcagtccggcaagacaatcctggatttcctgaagtccgacggcttcgccaacagaaacttcatgcagctgatccacgacgacagcctgacctttaaagaggacatccagaaagcccaggtgtccggccagggcgatagcctgcacgagcacattgccaatctggccggcagccccgccattaagaagggcatcctgcagacagtgaaggtggtggacgagctcgtgaaagtgatgggccggcacaagcccgagaacatcgtgatcgaaatggccagagagaaccagaccacccagaagggacagaagaacagccgcgagagaatgaagcggatcgaagagggcatcaaagagctgggcagccagatcctgaaagaacaccccgtggaaaacacccagctgcagaacgagaagctgtacctgtactacctgcagaatgggcgggatatgtacgtggaccaggaactggacatcaaccggctgtccgactacgatgtggaccatatcgtgcctcagagctttctgaaggacgactccatcgacaacaaggtgctgaccagaagcgacaagaaccggggcaagagcgacaacgtgccctccgaagaggtcgtgaagaagatgaagaactactggcggcagctgctgaacgccaagctgattacccagagaaagttcgacaatctgaccaaggccgagagaggcggcctgagcgaactggataaggccggcttcatcaagagacagctggtggaaacccggcagatcacaaagcacgtggcacagatcctggactcccggatgaacactaagtacgacgagaatgacaagctgatccgggaagtgaaagtgatcaccctgaagtccaagctggtgtccgatttccggaaggatttccagttttacaaagtgcgcgagatcaacaactaccaccacgcccacgacgcctacctgaacgccgtcgtgggaaccgccctgatcaaaaagtaccctaagctggaaagcgagttcgtgtacggcgactacaaggtgtacgacgtgcggaagatgatcgccaagagcgagcaggaaatcggcaaggctaccgccaagtacttcttctacagcaacatcatgaactttttcaagaccgagattaccctggccaacggcgagatccggaagcggcctctgatcgagacaaacggcgaaaccggggagatcgtgtgggataagggccgggattttgccaccgtgcggaaagtgctgagcatgccccaagtgaatatcgtgaaaaagaccgaggtgcagacaggcggcttcagcaaagagtctatcctgcccaagaggaacagcgataagctgatcgccagaaagaaggactgggaccctaagaagtacggcggcttcgacagccccaccgtggcctattctgtgctggtggtggccaaagtggaaaagggcaagtccaagaaactgaagagtgtgaaagagctgctggggatcaccatcatggaaagaagcagcttcgagaagaatcccatcgactttctggaagccaagggctacaaagaagtgaaaaaggacctgatcatcaagctgcctaagtactccctgttcgagctggaaaacggccggaagagaatgctggcctctgccggcgaactgcagaagggaaacgaactggccctgccctccaaatatgtgaacttcctgtacctggccagccactatgagaagctgaagggctcccccgaggataatgagcagaaacagctgtttgtggaacagcacaagcactacctggacgagatcatcgagcagatcagcgagttctccaagagagtgatcctggccgacgctaa

SEQ ID NO: 4 - protein, 1423 aa, Streptococcus pyogenes
MDYKDHDGDYKDHDIDYKDDDDKMAPKKKRKVGIHGVPAADKKYSIGLDIGTNSVGWAVITDEYKVPSKKFKVLGNTDRHSIKKNLIGALLFDSGETAEATRLKRTARRRYTRRKNRICYLQEIFSNEMAKVDDSFFHRLEESFLVEEDKKHERHPIFGNIVDEVAYHEKYPTIYHLRKKLVDSTDKADLRLIYLALAHMIKFRGHFLIEGDLNPDNSDVDKLFIQLVQTYNQLFEENPINASGVDAKAILSARLSKSRRLENLIAQLPGEKKNGLFGNLIALSLGLTPNFKSNFDLAEDAKLQLSKDTYDDDLDNLLAQIGDQYADLFLAAKNLSDAILLSDILRVNTEITKAPLSASMIKRYDEHHQDLTLLKALVRQQLPEKYKEIFFDQSKNGYAGYIDGGASQEEFYKFIKPILEKMDGTEELLVKLNREDLLRKQRTFDNGSIPHQIHLGELHAILRRQEDFYPFLKDNREKIEKILTFRIPYYVGPLARGNSRFAWMTRKSEETITPWNFEEVVDKGASAQSFIERMTNFDKNLPNEKVLPKHSLLYEYFTVYNELTKVKYVTEGMRKPAFLSGEQKKAIVDLLFKTNRKVTVKQLKEDYFKKIECFDSVEISGVEDRFNASLGTYHDLLKIIKDKDFLDNEENEDILEDIVLTLTLFEDREMIEERLKTYAHLFDDKVMKQLKRRRYTGWGRLSRKLINGIRDKQSGKTILDFLKSDGFANRNFMQLIHDDSLTFKEDIQKAQVSGQGDSLHEHIANLAGSPAIKKGILQTVKVVDELVKVMGRHKPENIVIEMARENQTTQKGQKNSRERMKRIEEGIKELGSQILKEHPVENTQLQNEKLYLYYLQNGRDMYVDQELDINRLSDYDVDHIVPQSFLKDDSIDNKVLTRSDKNRGKSDNVPSEEVVKKMKNYWRQLLNAKLITQRKFDNLTKAERGGLSELDKAGFIKRQLVETRQITKHVAQILDSRMNTKYDENDKLIREVKVITLKSKLVSDFRKDFQFYKVREINNYHHAHDAYLNAVVGTALIKKYPKLESEFVYGDYKVYDVRKMIAKSEQEIGKATAKYFFYSNIMNFFKTEITLANGEIRKRPLIETNGETGEIVWDKGRDFATVRKVLSMPQVNIVKKTEVQTGGFSKESILPKRNSDKLIARKKDWDPKKYGGFDSPTVAYSVLVVAKVEKGKSKKLKSVKELLGITIMERSSFEKNPIDFLEAKGYKEVKKDLIIKLPKYSLFELENGRKRMLASAGELQKGNELALPSKYVNFLYLASHYEKLKGSPEDNEQKQLFVEQHKHYLDEIIEQISEFSKRVILADANLDKVLSAYNKHRDKPIREQAENIIHLFTLTNLGAPAAFKYFDTTIDRKRYTSTKEVLDATLIHQSITGLYETRIDLSQLGGDKRPAATKKAGQAKKKK

SEQ ID NO: 5 - RNA, 105 nt, Artificial Sequence
  Description of Artificial Sequence: Synthetic polynucleotide
  modified_base (2)..(22): a, c, u, g, unknown or other
gnnnnnnnnnnnnnnnnnnnnnguuuuaguacucuggaaacagaaucuacuaaaacaaggcaaaugccguguuuaucucgucaacuuguuggcgaagauuuuuuu

SEQ ID NO: 6 - RNA, 83 nt, Artificial Sequence
  Description of Artificial Sequence: Synthetic oligonucleotide
guuuuaguacucuggaaacagaaucuacuaaaacaaggcaaaugccguguuuaucucgucaacuuguuggcgaagauuuuuuu

SEQ ID NO: 7 - DNA, 3345 bp, Staphylococcus aureus
atggccccaaagaagaagcggaaggtcggtatccacggagtcccagcagccaagcggaactacatcctgggcctggacatcggcatcaccagcgtgggctacggcatcatcgactacgagacacgggacgtgatcgatgccggcgtgcggctgttcaaagaggccaacgtggaaaacaacgagggcaggcggagcaagagaggcgccagaaggctgaagcggcggaggcggcatagaatccagagagtgaagaagctgctgttcgactacaacctgctgaccgaccacagcgagctgagcggcatcaacccctacgaggccagagtgaagggcctgagccagaagctgagcgaggaagagttctctgccgccctgctgcacctggccaagagaagaggcgtgcacaacgtgaacgaggtggaagaggacaccggcaacgagctgtccaccaaagagcagatcagccggaacagcaaggccctggaagagaaatacgtggccgaactgcagctggaacggctgaagaaagacggcgaagtgcggggcagcatcaacagattcaagaccagcgactacgtgaaagaagccaaacagctgctgaaggtgcagaaggcctaccaccagctggaccagagcttcatcgacacctacatcgacctgctggaaacccggcggacctactatgagggacctggcgagggcagccccttcggctggaaggacatcaaagaatggtacgagatgctgatgggccactgcacctacttccccgaggaactgcggagcgtgaagtacgcctacaacgccgacctgtacaacgccctgaacgacctgaacaatctcgtgatcaccagggacgagaacgagaagctggaatattacgagaagttccagatcatcgagaacgtgttcaagcagaagaagaagcccaccctgaagcagatcgccaaagaaatcctcgtgaacgaagaggatattaagggctacagagtgaccagcaccggcaagcccgagttcaccaacctgaaggtgtaccacgacatcaaggacattaccgcccggaaagagattattgagaacgccgagctgctggatcagattgccaagatcctgaccatctaccagagcagcgaggacatccaggaagaactgaccaatctgaactccgagctgacccaggaagagatcgagcagatctctaatctgaagggctataccggcacccacaacctgagcctgaaggccatcaacctgatcctggacgagctgtggcacaccaacgacaaccagatcgctatcttcaaccggctgaagctggtgcccaagaaggtggacctgtcccagcagaaagagatccccaccaccctggtggacgacttcatcctgagccccgtcgtgaagagaagcttcatccagagcatcaaagtgatcaacgccatcatcaagaagtacggcctgcccaacgacatcattatcgagctggcccgcgagaagaactccaaggacgcccagaaaatgatcaacgagatgcagaagcggaaccggcagaccaacgagcggatcgaggaaatcatccggaccaccggcaaagagaacgccaagtacctgatcgagaagatcaagctgcacgacatgcaggaaggcaagtgcctgtacagcctggaagccatccctctggaagatctgctgaacaaccccttcaactatgaggtggaccacatcatccccagaagcgtgtccttcgacaacagcttcaacaacaaggtgctcgtgaagcaggaagaaaacagcaagaagggcaaccggaccccattccagtacctgagcagcagcgacagcaagatcagctacgaaaccttcaagaagcacatcctgaatctggccaagggcaagggcagaatcagcaagaccaagaaagagtatctgctggaagaacgggacatcaacaggttctccgtgcagaaagacttcatcaaccggaacctggtggataccagatacgccaccagaggcctgatgaacctgctgcggagctacttcagagtgaacaacctggacgtgaaagtgaagtccatcaatggcggcttcaccagctttctgcggcggaagtggaagtttaagaaagagcggaacaaggggtacaagcaccacgccgaggacgccctgatcattgccaacgccgatttcatcttcaaagagtggaagaaactggacaaggccaaaaaagtgatggaaaaccagatgttcgaggaaaagcaggccgagagcatgcccgagatcgaaaccgagcaggagtacaaagagatcttcatcaccccccaccagatcaagcacattaaggacttcaaggactacaagtacagccaccgggtggacaagaagcctaatagagagctgattaacgacaccctgtactccacccggaaggacgacaagggcaacaccctgatcgtgaacaatctgaacggcctgtacgacaaggacaatgacaagctgaaaaagctgatcaacaagagccccgaaaagctgctgatgtaccaccacgacccccagacctaccagaaactgaagctgattatggaacagtacggcgacgagaagaatcccctgtacaagtactacgaggaaaccgggaactacctgaccaagtactccaaaaaggacaacggccccgtgatcaagaagattaagtattacggcaacaaactgaacgcccatctggacatcaccgacgactaccccaacagcagaaacaaggtcgtgaagctgtccctgaagccctacagattcgacgtgtacctggacaatggcgtgtacaagttcgtgaccgtgaagaatctggatgtgatcaaaaaagaaaactactacgaagtgaatagcaagtgctatgaggaagctaagaagctgaagaagatcagcaaccaggccgagtttatcgcctccttctacaacaacgatctgatcaagatcaacggcgagctgtatagagtgatcggcgtgaacaacgacctgctgaaccggatcgaagtgaacatgatcgacatcacctaccgcgagtacctggaaaacatgaacgacaagaggccccccaggatcattaagacaatcgcctccaagacccagagcattaagaagtacagcacagacattctgggcaacctgtatgaagtgaaatctaagaagcaccctcagatcatcaaaaagggcaaaaggccggcggccacgaaaaaggccggccaggcaaaaaagaaaaagggatcctacccatacgatgttccagattacgcttacccatacgatgttccagattacgcttacccatacgatgttccagattacgcttaa

SEQ ID NO: 8 - protein, 1114 aa, Staphylococcus aureus
MAPKKKRKVGIHGVPAAKRNYILGLDIGITSVGYGIIDYETRDVIDAGVRLFKEANVENNEGRRSKRGARRLKRRRRHRIQRVKKLLFDYNLLTDHSELSGINPYEARVKGLSQKLSEEEFSAALLHLAKRRGVHNVNEVEEDTGNELSTKEQISRNSKALEEKYVAELQLERLKKDGEVRGSINRFKTSDYVKEAKQLLKVQKAYHQLDQSFIDTYIDLLETRRTYYEGPGEGSPFGWKDIKEWYEMLMGHCTYFPEELRSVKYAYNADLYNALNDLNNLVITRDENEKLEYYEKFQIIENVFKQKKKPTLKQIAKEILVNEEDIKGYRVTSTGKPEFTNLKVYHDIKDITARKEIIENAELLDQIAKILTIYQSSEDIQEELTNLNSELTQEEIEQISNLKGYTGTHNLSLKAINLILDELWHTNDNQIAIFNRLKLVPKKVDLSQQKEIPTTLVDDFILSPVVKRSFIQSIKVINAIIKKYGLPNDIIIELAREKNSKDAQKMINEMQKRNRQTNERIEEIIRTTGKENAKYLIEKIKLHDMQEGKCLYSLEAIPLEDLLNNPFNYEVDHIIPRSVSFDNSFNNKVLVKQEENSKKGNRTPFQYLSSSDSKISYETFKKHILNLAKGKGRISKTKKEYLLEERDINRFSVQKDFINRNLVDTRYATRGLMNLLRSYFRVNNLDVKVKSINGGFTSFLRRKWKFKKERNKGYKHHAEDALIIANADFIFKEWKKLDKAKKVMENQMFEEKQAESMPEIETEQEYKEIFITPHQIKHIKDFKDYKYSHRVDKKPNRELINDTLYSTRKDDKGNTLIVNNLNGLYDKDNDKLKKLINKSPEKLLMYHHDPQTYQKLKLIMEQYGDEKNPLYKYYEETGNYLTKYSKKDNGPVIKKIKYYGNKLNAHLDITDDYPNSRNKVVKLSLKPYRFDVYLDNGVYKFVTVKNLDVIKKENYYEVNSKCYEEAKKLKKISNQAEFIASFYNNDLIKINGELYRVIGVNNDLLNRIEVNMIDITYREYLENMNDKRPPRIIKTIASKTQSIKKYSTDILGNLYEVKSKKHPQIIKKGKRPAATKKAGQAKKKKGSYPYDVPDYAYPYDVPDYAYPYDVPDYA

SEQ ID NO: 9 - DNA, 23 bp, Artificial Sequence
  Description of Artificial Sequence: Synthetic oligonucleotide
cccgaatccatgtaaggatctag

SEQ ID NO: 10 - DNA, 26 bp, Artificial Sequence
  Description of Artificial Sequence: Synthetic oligonucleotide
atcccacagggctgtattactggggc

SEQ ID NO: 11 - DNA, 23 bp, Artificial Sequence
  Description of Artificial Sequence: Synthetic oligonucleotide
ccacagggctgtattactggggc

SEQ ID NO: 12 - DNA, 23 bp, Artificial Sequence
  Description of Artificial Sequence: Synthetic oligonucleotide
cccagggctgtattactggggct

SEQ ID NO: 13 - DNA, 23 bp, Artificial Sequence
  Description of Artificial Sequence: Synthetic oligonucleotide
aggattcatatagaagaaaggaa

SEQ ID NO: 14 - DNA, 23 bp, Artificial Sequence
  Description of Artificial Sequence: Synthetic oligonucleotide
cctttgcatggtggtcggctttc

SEQ ID NO: 15 - DNA, 23 bp, Artificial Sequence
  Description of Artificial Sequence: Synthetic oligonucleotide
cggtcctgtaggggaacatagag

SEQ ID NO: 16 - DNA, 26 bp, Artificial Sequence
  Description of Artificial Sequence: Synthetic oligonucleotide
gcgggtctcctgtaggggaacataga

SEQ ID NO: 17 - DNA, 23 bp, Artificial Sequence
  Description of Artificial Sequence: Synthetic oligonucleotide
agggtgtgtggctgcagcagcac

SEQ ID NO: 18 - DNA, 23 bp, Artificial Sequence
  Description of Artificial Sequence: Synthetic oligonucleotide
gggtgtgtggctgcagcagcaca

SEQ ID NO: 19 - DNA, 26 bp, Artificial Sequence
  Description of Artificial Sequence: Synthetic oligonucleotide
cagggtggtgtgtggctgcagcagca

SEQ ID NO: 20 - DNA, 23 bp, Artificial Sequence
  Description of Artificial Sequence: Synthetic oligonucleotide
cctggagaggagcttagacagcg

SEQ ID NO: 21 - DNA, 23 bp, Artificial Sequence
  Description of Artificial Sequence: Synthetic oligonucleotide
cgggtaatagcaaaggctcaggg

SEQ ID NO: 22 - DNA, 26 bp, Artificial Sequence
  Description of Artificial Sequence: Synthetic oligonucleotide
actctgatccgcccaccttgtcctcc

SEQ ID NO: 23 - DNA, 23 bp, Artificial Sequence
  Description of Artificial Sequence: Synthetic oligonucleotide
tggcatcgttgcggggctgtctg

SEQ ID NO: 24 - DNA, 26 bp, Artificial Sequence
  Description of Artificial Sequence: Synthetic oligonucleotide
actctcccagtcaggaggagagggag

SEQ ID NO: 25 - DNA, 23 bp, Artificial Sequence
  Description of Artificial Sequence: Synthetic oligonucleotide
gggcaaatcaggaggcccctcgt

SEQ ID NO: 26 - DNA, 26 bp, Artificial Sequence
  Description of Artificial Sequence: Synthetic oligonucleotide
ttgaattgcagcctgtgttgggagga

SEQ ID NO: 27 - DNA, 23 bp, Artificial Sequence
  Description of Artificial Sequence: Synthetic oligonucleotide
cggaatctccctggctgcacctg

SEQ ID NO: 28 - DNA, 23 bp, Artificial Sequence
  Description of Artificial Sequence: Synthetic oligonucleotide
ccatgcatatcttcctatgctcc

SEQ ID NO: 29 - DNA, 23 bp, Artificial Sequence
  Description of Artificial Sequence: Synthetic oligonucleotide
cccgagactgagactgaagacag

SEQ ID NO: 30 - DNA, 23 bp, Artificial Sequence
  Description of Artificial Sequence: Synthetic oligonucleotide
cggtgcctgtaatcacagctact

SEQ ID NO: 31 - DNA, 23 bp, Artificial Sequence
  Description of Artificial Sequence: Synthetic oligonucleotide
ccatctctccaccaactgccaca

SEQ ID NO: 32 - DNA, 64 bp, Artificial Sequence
  Description of Artificial Sequence: Synthetic oligonucleotide
aaagtctgagtcctctcctgtctcaaagggcatagctgtttgcatttggttccaggcctgttga

SEQ ID NO: 33 - DNA, 25 bp, Artificial Sequence
  Description of Artificial Sequence: Synthetic oligonucleotide
ttcatatagaagaaaggaaagggaa

SEQ ID NO: 34 - DNA, 25 bp, Artificial Sequence
  Description of Artificial Sequence: Synthetic oligonucleotide
catatagaaggaaggaaagggaagg

SEQ ID NO: 35 - DNA, 26 bp, Artificial Sequence
  Description of Artificial Sequence: Synthetic oligonucleotide
catatagaagaaaaaagggaaggact

SEQ ID NO: 36 - DNA, 23 bp, Artificial Sequence
  Description of Artificial Sequence: Synthetic oligonucleotide
cagcccctggccaggcggctcgg

SEQ ID NO: 37 - DNA, 23 bp, Artificial Sequence
  Description of Artificial Sequence: Synthetic oligonucleotide
ttccgcagcccctggccaggcgg

SEQ ID NO: 38 - DNA, 23 bp, Artificial Sequence
  Description of Artificial Sequence: Synthetic oligonucleotide
taagccgagccgcctggccaggg

SEQ ID NO: 39 - DNA, 23 bp, Artificial Sequence
  Description of Artificial Sequence: Synthetic oligonucleotide
aagccgagccgcctggccagggg

SEQ ID NO: 40 - DNA, 23 bp, Artificial Sequence
  Description of Artificial Sequence: Synthetic oligonucleotide
accttccgcagcccctggccagg

SEQ ID NO: 41 - DNA, 23 bp, Artificial Sequence
  Description of Artificial Sequence: Synthetic oligonucleotide
acctgaccttccgcagcccctgg

SEQ ID NO: 42 - DNA, 23 bp, Artificial Sequence
  Description of Artificial Sequence: Synthetic oligonucleotide
agccgcctggccaggggctgcgg

SEQ ID NO: 43 - DNA, 23 bp, Artificial Sequence
  Description of Artificial Sequence: Synthetic oligonucleotide
gcctggccaggggctgcggaagg

SEQ ID NO: 44 - DNA, 23 bp, Artificial Sequence
  Description of Artificial Sequence: Synthetic oligonucleotide
gccaggggctgcggaaggtcagg

SEQ ID NO: 45 - DNA, 23 bp, Artificial Sequence
  Description of Artificial Sequence: Synthetic oligonucleotide
gctgcggaaggtcaggtagtcgg

SEQ ID NO: 46 - DNA, 23 bp, Artificial Sequence
  Description of Artificial Sequence: Synthetic oligonucleotide
ctgcggaaggtcaggtagtcggg

SEQ ID NO: 47 - DNA, 23 bp, Artificial Sequence
  Description of Artificial Sequence: Synthetic oligonucleotide
tgcggaaggtcaggtagtcgggg

SEQ ID NO: 48 - DNA, 23 bp, Artificial Sequence
  Description of Artificial Sequence: Synthetic oligonucleotide
aaggtcaggtagtcggggctcgg

SEQ ID NO: 49 - DNA, 23 bp, Artificial Sequence
  Description of Artificial Sequence: Synthetic oligonucleotide
gggctcggagcgcaagccgctgg

SEQ ID NO: 50 - DNA, 23 bp, Artificial Sequence
  Description of Artificial Sequence: Synthetic oligonucleotide
ggctcggagcgcaagccgctggg

SEQ ID NO: 51 - DNA, 23 bp, Artificial Sequence
  Description of Artificial Sequence: Synthetic oligonucleotide
gctcggagcgcaagccgctgggg

SEQ ID NO: 52 - DNA, 23 bp, Artificial Sequence
  Description of Artificial Sequence: Synthetic oligonucleotide
ctcggagcgcaagccgctggggg

SEQ ID NO: 53 - DNA, 23 bp, Artificial Sequence
  Description of Artificial Sequence: Synthetic oligonucleotide
gcccagttcaatgcccccagcgg

SEQ ID NO: 54 - DNA, 23 bp, Artificial Sequence
  Description of Artificial Sequence: Synthetic oligonucleotide
agccgctgggggcattgaactgg

SEQ ID NO: 55 - DNA, 23 bp, Artificial Sequence
  Description of Artificial Sequence: Synthetic oligonucleotide
gccgctgggggcattgaactggg

SEQ ID NO: 56 - DNA, 23 bp, Artificial Sequence
  Description of Artificial Sequence: Synthetic oligonucleotide
ctgggggcattgaactgggctgg

SEQ ID NO: 57 - DNA, 23 bp, Artificial Sequence
  Description of Artificial Sequence: Synthetic oligonucleotide
tgggggcattgaactgggctggg

SEQ ID NO: 58 - DNA, 23 bp, Artificial Sequence
  Description of Artificial Sequence: Synthetic oligonucleotide
gggggcattgaactgggctgggg

SEQ ID NO: 59 - DNA, 23 bp, Artificial Sequence
  Description of Artificial Sequence: Synthetic oligonucleotide
ggggcattgaactgggctggggg

SEQ ID NO: 60 - DNA, 23 bp, Artificial Sequence
  Description of Artificial Sequence: Synthetic oligonucleotide
ttgaactgggctgggggcgcagg

SEQ ID NO: 61 - DNA, 23 bp, Artificial Sequence
  Description of Artificial Sequence: Synthetic oligonucleotide
tgaactgggctgggggcgcaggg

SEQ ID NO: 62 - DNA, 23 bp, Artificial Sequence
  Description of Artificial Sequence: Synthetic oligonucleotide
gaactgggctgggggcgcagggg

SEQ ID NO: 63 - DNA, 23 bp, Artificial Sequence
  Description of Artificial Sequence: Synthetic oligonucleotide
tgctgcaaggtttttagttcggg

SEQ ID NO: 64 - DNA, 23 bp, Artificial Sequence
  Description of Artificial Sequence: Synthetic oligonucleotide
atgctgcaaggtttttagttcgg

SEQ ID NO: 65 - DNA, 23 bp, Artificial Sequence
  Description of Artificial Sequence: Synthetic oligonucleotide
tccgagcgctccatgctgcaagg

SEQ ID NO: 66 - DNA, 23 bp, Artificial Sequence
  Description of Artificial Sequence: Synthetic oligonucleotide
gaactaaaaaccttgcagcatgg

SEQ ID NO: 67 - DNA, 23 bp, Artificial Sequence
  Description of Artificial Sequence: Synthetic oligonucleotide
accttgcagcatggagcgctcgg

SEQ ID NO: 68 - DNA, 23 bp, Artificial Sequence
  Description of Artificial Sequence: Synthetic oligonucleotide
ccttccaccgcgtgcagggctgg

SEQ ID NO: 69 - DNA, 23 bp, Artificial Sequence
  Description of Artificial Sequence: Synthetic oligonucleotide
tcggacaccagccctgcacgcgg

SEQ ID NO: 70 - DNA, 23 bp, Artificial Sequence
  Description of Artificial Sequence: Synthetic oligonucleotide
ctctccttccaccgcgtgcaggg

SEQ ID NO: 71 - DNA, 23 bp, Artificial Sequence
  Description of Artificial Sequence: Synthetic oligonucleotide
tctctccttccaccgcgtgcagg

SEQ ID NO: 72 - DNA, 23 bp, Artificial Sequence
  Description of Artificial Sequence: Synthetic oligonucleotide
gacaccagccctgcacgcggtgg

SEQ ID NO: 73 - DNA, 23 bp, Artificial Sequence
  Description of Artificial Sequence: Synthetic oligonucleotide
ccagccctgcacgcggtggaagg

SEQ ID NO: 74 - DNA, 23 bp, Artificial Sequence
  Description of Artificial Sequence: Synthetic oligonucleotide
tgcacgcggtggaaggagagagg

SEQ ID NO: 75 - DNA, 23 bp, Artificial Sequence
  Description of Artificial Sequence: Synthetic oligonucleotide
gcacgcggtggaaggagagaggg

SEQ ID NO: 76 - DNA, 23 bp, Artificial Sequence
  Description of Artificial Sequence: Synthetic oligonucleotide
cgcggtggaaggagagagggagg

SEQ ID NO: 77 - DNA, 23 bp, Artificial Sequence
  Description of Artificial Sequence: Synthetic oligonucleotide
gcggtggaaggagagagggaggg

SEQ ID NO: 78 - DNA, 23 bp, Artificial Sequence
  Description of Artificial Sequence: Synthetic oligonucleotide
gtggaaggagagagggagggagg

SEQ ID NO: 79 - DNA, 23 bp, Artificial Sequence
  Description of Artificial Sequence: Synthetic oligonucleotide
gaaggagagagggagggaggtgg

SEQ ID NO: 80 - DNA, 23 bp, Artificial Sequence
  Description of Artificial Sequence: Synthetic oligonucleotide
ggagagagggagggaggtggagg

SEQ ID NO: 81 - DNA, 23 bp, Artificial Sequence
  Description of Artificial Sequence: Synthetic oligonucleotide
gggagggaggtggaggaccatgg

SEQ ID NO: 82 - DNA, 23 bp, Artificial Sequence
  Description of Artificial Sequence: Synthetic oligonucleotide
agggaggtggaggaccatggagg

SEQ ID NO: 83 - DNA, 23 bp, Artificial Sequence
  Description of Artificial Sequence: Synthetic oligonucleotide
gggaggtggaggaccatggaggg

SEQ ID NO: 84 - DNA, 23 bp, Artificial Sequence
  Description of Artificial Sequence: Synthetic oligonucleotide
ggcctcccgctttccctccatgg

SEQ ID NO: 85 - DNA, 23 bp, Artificial Sequence
  Description of Artificial Sequence: Synthetic oligonucleotide
ggaggaccatggagggaaagcgg

SEQ ID NO: 86 - DNA, 23 bp, Artificial Sequence
  Description of Artificial Sequence: Synthetic oligonucleotide
gaggaccatggagggaaagcggg

SEQ ID NO: 87 - DNA, 23 bp, Artificial Sequence
  Description of Artificial Sequence: Synthetic oligonucleotide
gaccatggagggaaagcgggagg

SEQ ID NO: 88 - DNA, 23 bp, Artificial Sequence
  Description of Artificial Sequence: Synthetic oligonucleotide
cactcccttctacaaagcggcgg

SEQ ID NO: 89 - DNA, 23 bp, Artificial Sequence
  Description of Artificial Sequence: Synthetic oligonucleotide
ccccactcccttctacaaagcgg

SEQ ID NO: 90 - DNA, 23 bp, Artificial Sequence
  Description of Artificial Sequence: Synthetic oligonucleotide
ggaggccgccgctttgtagaagg

SEQ ID NO: 91 - DNA, 23 bp, Artificial Sequence
  Description of Artificial Sequence: Synthetic oligonucleotide
gaggccgccgctttgtagaaggg

SEQ ID NO: 92 - DNA, 23 bp, Artificial Sequence
  Description of Artificial Sequence: Synthetic oligonucleotide
cgccgctttgtagaagggagtgg

SEQ ID NO: 93 - DNA, 23 bp, Artificial Sequence
  Description of Artificial Sequence: Synthetic oligonucleotide
gccgctttgtagaagggagtggg

SEQ ID NO: 94 - DNA, 23 bp, Artificial Sequence
  Description of Artificial Sequence: Synthetic oligonucleotide
ccgctttgtagaagggagtgggg

SEQ ID NO: 95 - DNA, 23 bp, Artificial Sequence
  Description of Artificial Sequence: Synthetic oligonucleotide
tgtagaagggagtggggaagtgg

SEQ ID NO: 96 - DNA, 23 bp, Artificial Sequence
  Description of Artificial Sequence: Synthetic oligonucleotide
tggcctgcgtcgaaagtctctgg

SEQ ID NO: 97 - DNA, 23 bp, Artificial Sequence
  Description of Artificial Sequence: Synthetic oligonucleotide
ggaccagagactttcgacgcagg

SEQ ID NO: 98 - DNA, 23 bp, Artificial Sequence
  Description of Artificial Sequence: Synthetic oligonucleotide
cgctgtccgtctcaggctcttgg

SEQ ID NO: 99 - DNA, 23 bp, Artificial Sequence
  Description of Artificial Sequence: Synthetic oligonucleotide
cgcaggccaagagcctgagacgg

SEQ ID NO: 100 - DNA, 23 bp, Artificial Sequence
  Description of Artificial Sequence: Synthetic oligonucleotide
ctgaaagcgctgtccgtctcagg

SEQ ID NO: 101 - DNA, 23 bp, Artificial Sequence
  Description of Artificial Sequence: Synthetic oligonucleotide
ccctttctgcagtggctgggagg

SEQ ID NO: 102 - DNA, 23 bp, Artificial Sequence
  Description of Artificial Sequence: Synthetic oligonucleotide
tccccctttctgcagtggctggg

SEQ ID NO: 103 - DNA, 23 bp, Artificial Sequence
  Description of Artificial Sequence: Synthetic oligonucleotide
ttccccctttctgcagtggctgg

SEQ ID NO: 104 - DNA, 23 bp, Artificial Sequence
  Description of Artificial Sequence: Synthetic oligonucleotide
ccatttccccctttctgcagtgg

SEQ ID NO: 105 - DNA, 23 bp, Artificial Sequence
  Description of Artificial Sequence: Synthetic oligonucleotide
tcctcccagccactgcagaaagg

SEQ ID NO: 106 - DNA, 23 bp, Artificial Sequence
  Description of Artificial Sequence: Synthetic oligonucleotide
cctcccagccactgcagaaaggg

SEQ ID NO: 107 - DNA, 23 bp, Artificial Sequence
  Description of Artificial Sequence: Synthetic oligonucleotide
ctcccagccactgcagaaagggg

SEQ ID NO: 108 - DNA, 23 bp, Artificial Sequence
  Description of Artificial Sequence: Synthetic oligonucleotide
tcccagccactgcagaaaggggg

SEQ ID NO: 109 - DNA, 23 bp, Artificial Sequence
  Description of Artificial Sequence: Synthetic oligonucleotide
ccactgcagaaagggggaaatgg

SEQ ID NO: 110 - DNA, 23 bp, Artificial Sequence
  Description of Artificial Sequence: Synthetic oligonucleotide
agggggaaatggcaactctttgg

SEQ ID NO: 111 - DNA, 23 bp, Artificial Sequence
  Description of Artificial Sequence: Synthetic oligonucleotide
gcaccctcccacggtgattatgg

SEQ ID NO: 112 - DNA, 23 bp, Artificial Sequence
  Description of Artificial Sequence: Synthetic oligonucleotide
ctctttggccataatcaccgtgg

SEQ ID NO: 113 - DNA, 23 bp, Artificial Sequence
  Description of Artificial Sequence: Synthetic oligonucleotide
tctttggccataatcaccgtggg

SEQ ID NO: 114 - DNA, 23 bp, Artificial Sequence
  Description of Artificial Sequence: Synthetic oligonucleotide
ttggccataatcaccgtgggagg

SEQ ID NO: 115 - DNA, 23 bp, Artificial Sequence
  Description of Artificial Sequence: Synthetic oligonucleotide
tggccataatcaccgtgggaggg

SEQ ID NO: 116 - DNA, 23 bp, Artificial Sequence
  Description of Artificial Sequence: Synthetic oligonucleotide
ttgcccttggcaccctcccacgg

SEQ ID NO: 117 - DNA, 23 bp, Artificial Sequence
  Description of Artificial Sequence: Synthetic oligonucleotide
atcaccgtgggagggtgccaagg

SEQ ID NO: 118 - DNA, 23 bp, Artificial Sequence
  Description of Artificial Sequence: Synthetic oligonucleotide
tcaccgtgggagggtgccaaggg

SEQ ID NO: 119 - DNA, 23 bp, Artificial Sequence
  Description of Artificial Sequence: Synthetic oligonucleotide
tgctgggtgggctttgcccttgg

SEQ ID NO: 120 - DNA, 23 bp, Artificial Sequence
  Description of Artificial Sequence: Synthetic oligonucleotide
gaataggtgtactgctgggtggg

SEQ ID NO: 121 - DNA, 23 bp, Artificial Sequence
  Description of Artificial Sequence: Synthetic oligonucleotide
ggaataggtgtactgctgggtgg

SEQ ID NO: 122 - DNA, 23 bp, Artificial Sequence
  Description of Artificial Sequence: Synthetic oligonucleotide
gttggaataggtgtactgctggg

SEQ ID NO: 123 - DNA, 23 bp, Artificial Sequence
  Description of Artificial Sequence: Synthetic oligonucleotide
ggttggaataggtgtactgctgg

SEQ ID NO: 124 - DNA, 23 bp, Artificial Sequence
  Description of Artificial Sequence: Synthetic oligonucleotide
gggcctggctgggttggaatagg

SEQ ID NO: 125 - DNA, 23 bp, Artificial Sequence
  Description of Artificial Sequence: Synthetic oligonucleotide
ggccgggggcctggctgggttgg

SEQ ID NO: 126 - DNA, 23 bp, Artificial Sequence
  Description of Artificial Sequence: Synthetic oligonucleotide
acacctattccaacccagccagg

SEQ ID NO: 127 - DNA, 23 bp, Artificial Sequence
  Description of Artificial Sequence: Synthetic oligonucleotide
cgctggccgggggcctggctggg

SEQ ID NO: 128 - DNA, 23 bp, Artificial Sequence
  Description of Artificial Sequence: Synthetic oligonucleotide
tcgctggccgggggcctggctgg

SEQ ID NO: 129 - DNA, 23 bp, Artificial Sequence
  Description of Artificial Sequence: Synthetic oligonucleotide
ttccaacccagccaggcccccgg

SEQ ID NO: 130 - DNA, 23 bp, Artificial Sequence
  Description of Artificial Sequence: Synthetic oligonucleotide
ggagtcgctggccgggggcctgg

SEQ ID NO: 131 - DNA, 23 bp, Artificial Sequence
  Description of Artificial Sequence: Synthetic oligonucleotide
tgtctggagtcgctggccggggg

SEQ ID NO: 132 - DNA, 23 bp, Artificial Sequence
  Description of Artificial Sequence: Synthetic oligonucleotide
ttgtctggagtcgctggccgggg

SEQ ID NO: 133 - DNA, 23 bp, Artificial Sequence
  Description of Artificial Sequence: Synthetic oligonucleotide
cttgtctggagtcgctggccggg

SEQ ID NO: 134 - DNA, 23 bp, Artificial Sequence
  Description of Artificial Sequence: Synthetic oligonucleotide
tcttgtctggagtcgctggccgg

SEQ ID NO: 135 - DNA, 23 bp, Artificial Sequence
  Description of Artificial Sequence: Synthetic oligonucleotide
aggttcttgtctggagtcgctgg

SEQ ID NO: 136 - DNA, 23 bp, Artificial Sequence
  Description of Artificial Sequence: Synthetic oligonucleotide
gtgtggcccaggttcttgtctgg

SEQ ID NO: 137 - DNA, 23 bp, Artificial Sequence
  Description of Artificial Sequence: Synthetic oligonucleotide
agcgactccagacaagaacctgg

SEQ ID NO: 138 - DNA, 23 bp, Artificial Sequence
  Description of Artificial Sequence: Synthetic oligonucleotide
gcgactccagacaagaacctggg

SEQ ID NO: 139 - DNA, 23 bp, Artificial Sequence
  Description of Artificial Sequence: Synthetic oligonucleotide
gctgccaccgtgtgtggcccagg

SEQ ID NO: 140 - DNA, 23 bp, Artificial Sequence
  Description of Artificial Sequence: Synthetic oligonucleotide
acaagaacctgggccacacacgg

SEQ ID NO: 141 - DNA, 23 bp, Artificial Sequence
  Description of Artificial Sequence: Synthetic oligonucleotide
ttagatgctgccaccgtgtgtgg

SEQ ID NO: 142 - DNA, 23 bp, Artificial Sequence
  Description of Artificial Sequence: Synthetic oligonucleotide
agaacctgggccacacacggtgg

SEQ ID NO: 143 - DNA, 23 bp, Artificial Sequence
  Description of Artificial Sequence: Synthetic oligonucleotide
acacacggtggcagcatctaagg

SEQ ID NO: 144 - DNA, 23 bp, Artificial Sequence
  Description of Artificial Sequence: Synthetic oligonucleotide
ggcagcatctaaggtgccccagg

SEQ ID NO: 145 - DNA, 23 bp, Artificial Sequence
  Description of Artificial Sequence: Synthetic oligonucleotide
gccaggagcacaggagcctgggg

SEQ ID NO: 146 - DNA, 23 bp, Artificial Sequence
  Description of Artificial Sequence: Synthetic oligonucleotide
ggccaggagcacaggagcctggg

SEQ ID NO: 147 - DNA, 23 bp, Artificial Sequence
  Description of Artificial Sequence: Synthetic oligonucleotide
tggccaggagcacaggagcctgg

SEQ ID NO: 148 - DNA, 23 bp, Artificial Sequence
  Description of Artificial Sequence: Synthetic oligonucleotide
cagggcctggccaggagcacagg

SEQ ID NO: 149 - DNA, 23 bp, Artificial Sequence
  Description of Artificial Sequence: Synthetic oligonucleotide
gccccaggctcctgtgctcctgg

SEQ ID NO: 150 - DNA, 23 bp, Artificial Sequence
  Description of Artificial Sequence: Synthetic oligonucleotide
aggctcctgtgctcctggccagg

SEQ ID NO: 151 - DNA, 23 bp, Artificial Sequence
  Description of Artificial Sequence: Synthetic oligonucleotide
tctgagtgcagggcctggccagg

SEQ ID NO: 152 - DNA, 23 bp, Artificial Sequence
  Description of Artificial Sequence: Synthetic oligonucleotide
cagtgtctgagtgcagggcctgg

SEQ ID NO: 153 - DNA, 23 bp, Artificial Sequence
  Description of Artificial Sequence: Synthetic oligonucleotide
gccagcagtgtctgagtgcaggg

SEQ ID NO: 154 - DNA, 23 bp, Artificial Sequence
  Description of Artificial Sequence: Synthetic oligonucleotide
tgccagcagtgtctgagtgcagg

SEQ ID NO: 155 - DNA, 23 bp, Artificial Sequence
  Description of Artificial Sequence: Synthetic oligonucleotide
gccctgcactcagacactgctgg

SEQ ID NO: 156 - DNA, 23 bp, Artificial Sequence
  Description of Artificial Sequence: Synthetic oligonucleotide
tgtacccagagagcagtgtcggg

SEQ ID NO: 157 - DNA, 23 bp, Artificial Sequence
  Description of Artificial Sequence: Synthetic oligonucleotide
ctgtacccagagagcagtgtcgg

SEQ ID NO: 158 - DNA, 23 bp, Artificial Sequence
  Description of Artificial Sequence: Synthetic oligonucleotide
tggcacccgacactgctctctgg

SEQ ID NO: 159 - DNA, 23 bp, Artificial Sequence
  Description of Artificial Sequence: Synthetic oligonucleotide
ggcacccgacactgctctctggg

SEQ ID NO: 160 - DNA, 23 bp, Artificial Sequence
  Description of Artificial Sequence: Synthetic oligonucleotide
actgctctctgggtacagcaagg

SEQ ID NO: 161 - DNA, 23 bp, Artificial Sequence
  Description of Artificial Sequence: Synthetic oligonucleotide
ctgctctctgggtacagcaaggg

SEQ ID NO: 162 - DNA, 23 bp, Artificial Sequence
  Description of Artificial Sequence: Synthetic oligonucleotide
tgggtacagcaagggcaatgtgg

SEQ ID NO: 163 - DNA, 23 bp, Artificial Sequence
  Description of Artificial Sequence: Synthetic oligonucleotide
tctcctgctcttcatcgggcagg

SEQ ID NO: 164 - DNA, 23 bp, Artificial Sequence
  Description of Artificial Sequence: Synthetic oligonucleotide
gcattctcctgctcttcatcggg

SEQ ID NO: 165 - DNA, 23 bp, Artificial Sequence
  Description of Artificial Sequence: Synthetic oligonucleotide
tgcattctcctgctcttcatcgg

SEQ ID NO: 166 - DNA, 23 bp, Artificial Sequence
  Description of Artificial Sequence: Synthetic oligonucleotide
tgtcctgcccgatgaagagcagg

SEQ ID NO: 167 - DNA, 23 bp, Artificial Sequence
  Description of Artificial Sequence: Synthetic oligonucleotide
tgaagagcaggagaatgcactgg

SEQ ID NO: 168 - DNA, 23 bp, Artificial Sequence
  Description of Artificial Sequence: Synthetic oligonucleotide
gaagagcaggagaatgcactggg

SEQ ID NO: 169 - DNA, 23 bp, Artificial Sequence
  Description of Artificial Sequence: Synthetic oligonucleotide
catttgaacagtgtgtgtgaggg

SEQ ID NO: 170 - DNA, 23 bp, Artificial Sequence
  Description of Artificial Sequence: Synthetic oligonucleotide
ccatttgaacagtgtgtgtgagg

SEQ ID NO: 171 - DNA, 23 bp, Artificial Sequence
  Description of Artificial Sequence: Synthetic oligonucleotide
cctcacacacactgttcaaatgg

SEQ ID NO: 172 - DNA, 23 bp, Artificial Sequence
  Description of Artificial Sequence: Synthetic oligonucleotide
ctcacacacactgttcaaatggg

SEQ ID NO: 173 - DNA, 23 bp, Artificial Sequence
  Description of Artificial Sequence: Synthetic oligonucleotide
tcacacacactgttcaaatgggg

SEQ ID NO: 174 - DNA, 23 bp, Artificial Sequence
  Description of Artificial Sequence: Synthetic oligonucleotide
tggggaaactgagtcctgagtgg

SEQ ID NO: 175 - DNA, 23 bp, Artificial Sequence
  Description of Artificial Sequence: Synthetic oligonucleotide
gtgggaaagtggaaccactcagg

SEQ ID NO: 176 - DNA, 23 bp, Artificial Sequence
  Description of Artificial Sequence: Synthetic oligonucleotide
acttcaggactgtgggaaagtgg

SEQ ID NO: 177 - DNA, 23 bp, Artificial Sequence
  Description of Artificial Sequence: Synthetic oligonucleotide
agtgcacacttcaggactgtggg

SEQ ID NO: 178 - DNA, 23 bp, Artificial Sequence
  Description of Artificial Sequence: Synthetic oligonucleotide
cagtgcacacttcaggactgtgg

SEQ ID NO: 179 - DNA, 23 bp, Artificial Sequence
  Description of Artificial Sequence: Synthetic oligonucleotide
ctggctccagtgcacacttcagg

SEQ ID NO: 180 - DNA, 23 bp, Artificial Sequence
  Description of Artificial Sequence: Synthetic oligonucleotide
cacagtcctgaagtgtgcactgg

SEQ ID NO: 181 - DNA, 23 bp, Artificial Sequence
  Description of Artificial Sequence: Synthetic oligonucleotide
ctgaagtgtgcactggagccagg

SEQ ID NO: 182 - DNA, 23 bp, Artificial Sequence
  Description of Artificial Sequence: Synthetic oligonucleotide
gtgtgcactggagccaggattgg

SEQ ID NO: 183 - DNA, 23 bp, Artificial Sequence
  Description of Artificial Sequence: Synthetic oligonucleotide
tttaagacagactccaatcctgg

SEQ ID NO: 184 - DNA, 23 bp, Artificial Sequence
  Description of Artificial Sequence: Synthetic oligonucleotide
gtctgtcttaaagtaatagctgg

SEQ ID NO: 185 - DNA, 23 bp, Artificial Sequence
  Description of Artificial Sequence: Synthetic oligonucleotide
tctgtcttaaagtaatagctggg

SEQ ID NO: 186 - DNA, 23 bp, Artificial Sequence
  Description of Artificial Sequence: Synthetic oligonucleotide
atagctgggtttgtaaatgtagg

SEQ ID NO: 187 - DNA, 23 bp, Artificial Sequence
  Description of Artificial Sequence: Synthetic oligonucleotide
atgtaggacactatcattgcagg

SEQ ID NO: 188 - DNA, 23 bp, Artificial Sequence
  Description of Artificial Sequence: Synthetic oligonucleotide
acacatcttcagggtctcaaagg

SEQ ID NO: 189 - DNA, 23 bp, Artificial Sequence
  Description of Artificial Sequence: Synthetic oligonucleotide
ctaaagccaacacatcttcaggg

SEQ ID NO: 190 - DNA, 23 bp, Artificial Sequence
  Description of Artificial Sequence: Synthetic oligonucleotide
cctaaagccaacacatcttcagg

SEQ ID NO: 191 - DNA, 23 bp, Artificial Sequence
  Description of Artificial Sequence: Synthetic oligonucleotide
ttgagaccctgaagatgtgttgg

SEQ ID NO: 192 - DNA, 23 bp, Artificial Sequence
  Description of Artificial Sequence: Synthetic oligonucleotide
cctgaagatgtgttggctttagg

SEQ ID NO: 193 - DNA, 23 bp, Artificial Sequence
  Description of Artificial Sequence: Synthetic oligonucleotide
aggagacaaactcaagcagaagg

SEQ ID NO: 194 - DNA, 23 bp, Artificial Sequence
  Description of Artificial Sequence: Synthetic oligonucleotide
acaaactcaagcagaaggtctgg

SEQ ID NO: 195 - DNA, 23 bp, Artificial Sequence
  Description of Artificial Sequence: Synthetic oligonucleotide
cagaaggtctggtctgatagtgg

SEQ ID NO: 196 - DNA, 23 bp, Artificial Sequence
  Description of Artificial Sequence: Synthetic oligonucleotide
ctctgcctgggtcagtattaggg

SEQ ID NO: 197 - DNA, 23 bp, Artificial Sequence
  Description of Artificial Sequence: Synthetic oligonucleotide
cctctgcctgggtcagtattagg

SEQ ID NO: 198 - DNA, 23 bp, Artificial Sequence
  Description of Artificial Sequence: Synthetic oligonucleotide
agtggccctaatactgacccagg

SEQ ID NO: 199 - DNA, 23 bp, Artificial Sequence
  Description of Artificial Sequence: Synthetic oligonucleotide
cctaatactgacccaggcagagg

SEQ ID NO: 200 - DNA, 23 bp, Artificial Sequence
  Description of Artificial Sequence: Synthetic oligonucleotide
aatgttgcctgcctctgcctggg

SEQ ID NO: 201 - DNA, 23 bp, Artificial Sequence
  Description of Artificial Sequence: Synthetic oligonucleotide
aaatgttgcctgcctctgcctgg

SEQ ID NO: 202 - DNA, 23 bp, Artificial Sequence
  Description of Artificial Sequence: Synthetic oligonucleotide
atactgacccaggcagaggcagg

SEQ ID NO: 203 - DNA, 23 bp, Artificial Sequence
  Description of Artificial Sequence: Synthetic oligonucleotide
caggtatggcctggtttttgagg

SEQ ID NO: 204 - DNA, 23 bp, Artificial Sequence
  Description of Artificial Sequence: Synthetic oligonucleotide
acatttctacctcaaaaaccagg

SEQ ID NO: 205 - DNA, 23 bp, Artificial Sequence
  Description of Artificial Sequence: Synthetic oligonucleotide
tttgtgacgcaggtatggcctgg

SEQ ID NO: 206 - DNA, 23 bp, Artificial Sequence
  Description of Artificial Sequence: Synthetic oligonucleotide
gggtatttgtgacgcaggtatgg

SEQ ID NO: 207 - DNA, 23 bp, Artificial Sequence
  Description of Artificial Sequence: Synthetic oligonucleotide
agcctgggtatttgtgacgcagg

SEQ ID NO: 208 - DNA, 23 bp, Artificial Sequence
  Description of Artificial Sequence: Synthetic oligonucleotide
tacctgcgtcacaaatacccagg

SEQ ID NO: 209 - DNA, 23 bp, Artificial Sequence
  Description of Artificial Sequence: Synthetic oligonucleotide
tggaagctgcagcaaagcctggg

SEQ ID NO: 210 - DNA, 23 bp, Artificial Sequence
  Description of Artificial Sequence: Synthetic oligonucleotide
ctggaagctgcagcaaagcctgg

SEQ ID NO: 211 - DNA, 23 bp, Artificial Sequence
  Description of Artificial Sequence: Synthetic oligonucleotide
gttggtgcaaccaggtaggctgg

SEQ ID NO: 212 - DNA, 23 bp, Artificial Sequence
  Description of Artificial Sequence: Synthetic oligonucleotide
gctgcagcttccagcctacctgg

SEQ ID NO: 213 - DNA, 23 bp, Artificial Sequence
  Description of Artificial Sequence: Synthetic oligonucleotide
agaagttggtgcaaccaggtagg

SEQ ID NO: 214 - DNA, 23 bp, Artificial Sequence
  Description of Artificial Sequence: Synthetic oligonucleotide
aaaaagaagttggtgcaaccagg

SEQ ID NO: 215 - DNA, 23 bp, Artificial Sequence
  Description of Artificial Sequence: Synthetic oligonucleotide
cctagttatgaaaaagaagttgg

SEQ ID NO: 216 - DNA, 23 bp, Artificial Sequence
  Description of Artificial Sequence: Synthetic oligonucleotide
ccaacttctttttcataactagg

SEQ ID NO: 217 - DNA, 23 bp, Artificial Sequence
  Description of Artificial Sequence: Synthetic oligonucleotide
atcttgtagtgactcctcagagg

SEQ ID NO: 218 - DNA, 23 bp, Artificial Sequence
  Description of Artificial Sequence: Synthetic oligonucleotide
tggtatttaggcttcctctgagg

SEQ ID NO: 219 - DNA, 23 bp, Artificial Sequence
  Description of Artificial Sequence: Synthetic oligonucleotide
gccagaccccgatggtatttagg

SEQ ID NO: 220 - DNA, 23 bp, Artificial Sequence
  Description of Artificial Sequence: Synthetic oligonucleotide
agaggaagcctaaataccatcgg

SEQ ID NO: 221 - DNA, 23 bp, Artificial Sequence
  Description of Artificial Sequence: Synthetic oligonucleotide
gaggaagcctaaataccatcggg

SEQ ID NO: 222 - DNA, 23 bp, Artificial Sequence
  Description of Artificial Sequence: Synthetic oligonucleotide
aggaagcctaaataccatcgggg

SEQ ID NO: 223 - DNA, 23 bp, Artificial Sequence
  Description of Artificial Sequence: Synthetic oligonucleotide
gtgtgaacgccagaccccgatgg

SEQ ID NO: 224 - DNA, 23 bp, Artificial Sequence
  Description of Artificial Sequence: Synthetic oligonucleotide
gcctaaataccatcggggtctgg

SEQ ID NO: 225 - DNA, 23 bp, Artificial Sequence
  Description of Artificial Sequence: Synthetic oligonucleotide
gaggtttgggcattgcttgtggg

SEQ ID NO: 226 - DNA, 23 bp, Artificial Sequence
  Description of Artificial Sequence: Synthetic oligonucleotide
ggaggtttgggcattgcttgtgg

SEQ ID NO: 227 - DNA, 23 bp, Artificial Sequence
  Description of Artificial Sequence: Synthetic oligonucleotide
gcccagtctcttggaggtttggg

SEQ ID NO: 228 - DNA, 23 bp, Artificial Sequence
  Description of Artificial Sequence: Synthetic oligonucleotide
tgcccagtctcttggaggtttgg

SEQ ID NO: 229 - DNA, 23 bp, Artificial Sequence
  Description of Artificial Sequence: Synthetic oligonucleotide
agatctgcccagtctcttggagg

SEQ ID NO: 230 - DNA, 23 bp, Artificial Sequence
  Description of Artificial Sequence: Synthetic oligonucleotide
tgcccaaacctccaagagactgg

SEQ ID NO: 231 - DNA, 23 bp, Artificial Sequence
  Description of Artificial Sequence: Synthetic oligonucleotide
cacagatctgcccagtctcttgg

SEQ ID NO: 232 - DNA, 23 bp, Artificial Sequence
  Description of Artificial Sequence: Synthetic oligonucleotide
gcccaaacctccaagagactggg

SEQ ID NO: 233 - DNA, 23 bp, Artificial Sequence
  Description of Artificial Sequence: Synthetic oligonucleotide
ctcaaatcaaaactcattgttgg

SEQ ID NO: 234 - DNA, 23 bp, Artificial Sequence
  Description of Artificial Sequence: Synthetic oligonucleotide
tcaaatcaaaactcattgttggg

SEQ ID NO: 235 - DNA, 23 bp, Artificial Sequence
  Description of Artificial Sequence: Synthetic oligonucleotide
caaatcaaaactcattgttgggg

SEQ ID NO: 236 - DNA, 23 bp, Artificial Sequence
  Description of Artificial Sequence: Synthetic oligonucleotide
aaatcaaaactcattgttggggg

SEQ ID NO: 237 - DNA, 23 bp, Artificial Sequence
  Description of Artificial Sequence: Synthetic oligonucleotide
ggtgatagagttgacttcacagg

SEQ ID NO: 238 - DNA, 23 bp, Artificial Sequence
  Description of Artificial Sequence: Synthetic oligonucleotide
gcaaggagccaagactttcaggg

SEQ ID NO: 239 - DNA, 23 bp, Artificial Sequence
  Description of Artificial Sequence: Synthetic oligonucleotide
tgcaaggagccaagactttcagg

SEQ ID NO: 240 - DNA, 23 bp, Artificial Sequence
  Description of Artificial Sequence: Synthetic oligonucleotide
ttcacaggccctgaaagtcttgg

SEQ ID NO: 241 - DNA, 23 bp, Artificial Sequence
  Description of Artificial Sequence: Synthetic oligonucleotide
aagtcttggctccttgcactagg

SEQ ID NO: 242 - DNA, 23 bp, Artificial Sequence
  Description of Artificial Sequence: Synthetic oligonucleotide
cccagagcactcctagtgcaagg

SEQ ID NO: 243 - DNA, 23 bp, Artificial Sequence
  Description of Artificial Sequence: Synthetic oligonucleotide
tccttgcactaggagtgctctgg

SEQ ID NO: 244 - DNA, 23 bp, Artificial Sequence
  Description of Artificial Sequence: Synthetic oligonucleotide
ccttgcactaggagtgctctggg

SEQ ID NO: 245 - DNA, 23 bp, Artificial Sequence
  Description of Artificial Sequence: Synthetic oligonucleotide
cactaggagtgctctgggtacgg

SEQ ID NO: 246 - DNA, 23 bp, Artificial Sequence
  Description of Artificial Sequence: Synthetic oligonucleotide
actaggagtgctctgggtacggg

SEQ ID NO: 247 - DNA, 23 bp, Artificial Sequence
  Description of Artificial Sequence: Synthetic oligonucleotide
agtgctctgggtacgggtacagg

SEQ ID NO: 248 - DNA, 23 bp, Artificial Sequence
  Description of Artificial Sequence: Synthetic oligonucleotide
gggtacaggctgccccttgtagg

SEQ ID NO: 249 - DNA, 23 bp, Artificial Sequence
  Description of Artificial Sequence: Synthetic oligonucleotide
ggtacaggctgccccttgtaggg

SEQ ID NO: 250 - DNA, 23 bp, Artificial Sequence
  Description of Artificial Sequence: Synthetic oligonucleotide
gagcaactatgccctacaagggg

SEQ ID NO: 251 - DNA, 23 bp, Artificial Sequence
  Description of Artificial Sequence: Synthetic oligonucleotide
agagcaactatgccctacaaggg

SEQ ID NO: 252 - DNA, 23 bp, Artificial Sequence
  Description of Artificial Sequence: Synthetic oligonucleotide
aagagcaactatgccctacaagg

SEQ ID NO: 253 - DNA, 23 bp, Artificial Sequence
  Description of Artificial Sequence: Synthetic oligonucleotide
gaccataaagccacaagtagagg

SEQ ID NO: 254 - DNA, 23 bp, Artificial Sequence
  Description of Artificial Sequence: Synthetic oligonucleotide
gctcttgtttcctctacttgtgg

SEQ ID NO: 255 - DNA, 23 bp, Artificial Sequence
  Description of Artificial Sequence: Synthetic oligonucleotide
ttcctctacttgtggctttatgg

SEQ ID NO: 256 - DNA, 23 bp, Artificial Sequence
  Description of Artificial Sequence: Synthetic oligonucleotide
tacttgtggctttatggtctagg

SEQ ID NO: 257 - DNA, 23 bp, Artificial Sequence
  Description of Artificial Sequence: Synthetic oligonucleotide
ctttatggtctaggcctttcagg

SEQ ID NO: 258 - DNA, 23 bp, Artificial Sequence
  Description of Artificial Sequence: Synthetic oligonucleotide
cagagccccaaactcctgaaagg

SEQ ID NO: 259 - DNA, 23 bp, Artificial Sequence
  Description of Artificial Sequence: Synthetic oligonucleotide
gtctaggcctttcaggagtttgg

SEQ ID NO: 260 - DNA, 23 bp, Artificial Sequence
  Description of Artificial Sequence: Synthetic oligonucleotide
tctaggcctttcaggagtttggg

SEQ ID NO: 261 - DNA, 23 bp, Artificial Sequence
  Description of Artificial Sequence: Synthetic oligonucleotide
ctaggcctttcaggagtttgggg

SEQ ID NO: 262 - DNA, 23 bp, Artificial Sequence
  Description of Artificial Sequence: Synthetic oligonucleotide
ctttcaggagtttggggctctgg

SEQ ID NO: 263 - DNA, 23 bp, Artificial Sequence
  Description of Artificial Sequence: Synthetic oligonucleotide
tcaggagtttggggctctggcgg

SEQ ID NO: 264 - DNA, 23 bp, Artificial Sequence
  Description of Artificial Sequence: Synthetic oligonucleotide
agtttggggctctggcggagagg

SEQ ID NO: 265 - DNA, 23 bp, Artificial Sequence
  Description of Artificial Sequence: Synthetic oligonucleotide
gtttggggctctggcggagaggg

SEQ ID NO: 266 - DNA, 23 bp, Artificial Sequence
  Description of Artificial Sequence: Synthetic oligonucleotide
ctctggcggagagggcctgctgg

SEQ ID NO: 267 - DNA, 23 bp, Artificial Sequence
  Description of Artificial Sequence: Synthetic oligonucleotide
tctggcggagagggcctgctggg

SEQ ID NO: 268 - DNA, 23 bp, Artificial Sequence
  Description of Artificial Sequence: Synthetic oligonucleotide
tggccagatgtgctcccagcagg

SEQ ID NO: 269 - DNA, 23 bp, Artificial Sequence
  Description of Artificial Sequence: Synthetic oligonucleotide
gggcctgctgggagcacatctgg

SEQ ID NO: 270 - DNA, 23 bp, Artificial Sequence
  Description of Artificial Sequence: Synthetic oligonucleotide
tttgatttcactctgcagggtgg

SEQ ID NO: 271 - DNA, 23 bp, Artificial Sequence
  Description of Artificial Sequence: Synthetic oligonucleotide
tggtttgatttcactctgcaggg

SEQ ID NO: 272 - DNA, 23 bp, Artificial Sequence
  Description of Artificial Sequence: Synthetic oligonucleotide
ctggtttgatttcactctgcagg

SEQ ID NO: 273 - DNA, 23 bp, Artificial Sequence
  Description of Artificial Sequence: Synthetic oligonucleotide
ctgcagagtgaaatcaaaccagg

SEQ ID NO: 274 - DNA, 23 bp, Artificial Sequence
  Description of Artificial Sequence: Synthetic oligonucleotide
gagtgaaatcaaaccaggcctgg

SEQ ID NO: 275 - DNA, 23 bp, Artificial Sequence
  Description of Artificial Sequence: Synthetic oligonucleotide
gttgaggttgcagccaggcctgg

SEQ ID NO: 276 - DNA, 23 bp, Artificial Sequence
  Description of Artificial Sequence: Synthetic oligonucleotide
agggtgttgaggttgcagccagg

SEQ ID NO: 277 - DNA, 23 bp, Artificial Sequence
  Description of Artificial Sequence: Synthetic oligonucleotide
ctctttccaggagggtgttgagg

SEQ ID NO: 278 - DNA, 23 bp, Artificial Sequence
  Description of Artificial Sequence: Synthetic oligonucleotide
ctgcaacctcaacaccctcctgg

SEQ ID NO: 279 - DNA, 23 bp, Artificial Sequence
  Description of Artificial Sequence: Synthetic oligonucleotide
gtattctcctctttccaggaggg

SEQ ID NO: 280 - DNA, 23 bp, Artificial Sequence
  Description of Artificial Sequence: Synthetic oligonucleotide
agtattctcctctttccaggagg

SEQ ID NO: 281 - DNA, 23 bp, Artificial Sequence
  Description of Artificial Sequence: Synthetic oligonucleotide
ctcaacaccctcctggaaagagg

SEQ ID NO: 282 - DNA, 23 bp, Artificial Sequence
  Description of Artificial Sequence: Synthetic oligonucleotide
cccagtattctcctctttccagg

SEQ ID NO: 283 - DNA, 23 bp, Artificial Sequence
  Description of Artificial Sequence: Synthetic oligonucleotide
tcctggaaagaggagaatactgg

SEQ ID NO: 284 - DNA, 23 bp, Artificial Sequence
  Description of Artificial Sequence: Synthetic oligonucleotide
cctggaaagaggagaatactggg

SEQ ID NO: 285 - DNA, 23 bp, Artificial Sequence
  Description of Artificial Sequence: Synthetic oligonucleotide
ctggaaagaggagaatactgggg

SEQ ID NO: 286 - DNA, 23 bp, Artificial Sequence
  Description of Artificial Sequence: Synthetic oligonucleotide
ggagaatactggggatatcctgg

SEQ ID NO: 287 - DNA, 23 bp, Artificial Sequence
  Description of Artificial Sequence: Synthetic oligonucleotide
gagaatactggggatatcctggg

SEQ ID NO: 288 - DNA, 23 bp, Artificial Sequence
  Description of Artificial Sequence: Synthetic oligonucleotide
agaatactggggatatcctgggg

SEQ ID NO: 289 - DNA, 23 bp, Artificial Sequence
  Description of Artificial Sequence: Synthetic oligonucleotide
cccacttccagaaagaccccagg

SEQ ID NO: 290 - DNA, 23 bp, Artificial Sequence
  Description of Artificial Sequence: Synthetic oligonucleotide
gggatatcctggggtctttctgg

SEQ ID NO: 291 - DNA, 23 bp, Artificial Sequence
  Description of Artificial Sequence: Synthetic oligonucleotide
tcctggggtctttctggaagtgg

SEQ ID NO: 292 - DNA, 23 bp, Artificial Sequence
  Description of Artificial Sequence: Synthetic oligonucleotide
cctggggtctttctggaagtggg

SEQ ID NO: 293 - DNA, 23 bp, Artificial Sequence
  Description of Artificial Sequence: Synthetic oligonucleotide
tgggagaatcagctttgacttgg

SEQ ID NO: 294 - DNA, 23 bp, Artificial Sequence
  Description of Artificial Sequence: Synthetic oligonucleotide
gggagaatcagctttgacttggg

SEQ ID NO: 295 - DNA, 23 bp, Artificial Sequence
  Description of Artificial Sequence: Synthetic oligonucleotide
gcagtgtgcagaatagagtgagg

SEQ ID NO: 296 - DNA, 23 bp, Artificial Sequence
  Description of Artificial Sequence: Synthetic oligonucleotide
cagtgtgcagaatagagtgaggg

SEQ ID NO: 297 - DNA, 23 bp, Artificial Sequence
  Description of Artificial Sequence: Synthetic oligonucleotide
agtgtgcagaatagagtgagggg

SEQ ID NO: 298 - DNA, 23 bp, Artificial Sequence
  Description of Artificial Sequence: Synthetic oligonucleotide
gtgtgcagaatagagtgaggggg

SEQ ID NO: 299 - DNA, 23 bp, Artificial Sequence
  Description of Artificial Sequence: Synthetic oligonucleotide
tgtgcagaatagagtgagggggg

SEQ ID NO: 300 - DNA, 23 bp, Artificial Sequence
  Description of Artificial Sequence: Synthetic oligonucleotide
ggggatgtcagaaagatgagagg

SEQ ID NO: 301 - DNA, 23 bp, Artificial Sequence
  Description of Artificial Sequence: Synthetic oligonucleotide
gggatgtcagaaagatgagaggg

SEQ ID NO: 302 - DNA, 23 bp, Artificial Sequence
  Description of Artificial Sequence: Synthetic oligonucleotide
agaaagatgagagggatatgagg

SEQ ID NO: 303 - DNA, 23 bp, Artificial Sequence
  Description of Artificial Sequence: Synthetic oligonucleotide
gtgcttgcattttgatgttgagg

SEQ ID NO: 304 - DNA, 23 bp, Artificial Sequence
  Description of Artificial Sequence: Synthetic oligonucleotide
aacatcaaaatgcaagcacctgg

SEQ ID NO: 305 - DNA, 23 bp, Artificial Sequence
  Description of Artificial Sequence: Synthetic oligonucleotide
gcagagataataaaaatgccagg

SEQ ID NO: 306 - DNA, 23 bp, Artificial Sequence
  Description of Artificial Sequence: Synthetic oligonucleotide
agagagaccaacggagaggtggg

SEQ ID NO: 307 - DNA, 23 bp, Artificial Sequence
  Description of Artificial Sequence: Synthetic oligonucleotide
cagagagaccaacggagaggtgg

SEQ ID NO: 308 - DNA, 23 bp, Artificial Sequence
  Description of Artificial Sequence: Synthetic oligonucleotide
atctctgcccacctctccgttgg

SEQ ID NO: 309 - DNA, 23 bp, Artificial Sequence
  Description of Artificial Sequence: Synthetic oligonucleotide
aggcagagagaccaacggagagg

SEQ ID NO: 310 - DNA, 23 bp, Artificial Sequence
  Description of Artificial Sequence: Synthetic oligonucleotide
aggaaaggcagagagaccaacgg

SEQ ID NO: 311 - DNA, 23 bp, Artificial Sequence
  Description of Artificial Sequence: Synthetic oligonucleotide
acacaattcattggcaggaaagg

SEQ ID NO: 312 - DNA, 23 bp, Artificial Sequence
  Description of Artificial Sequence: Synthetic oligonucleotide
acataacacaattcattggcagg

SEQ ID NO: 313 - DNA, 23 bp, Artificial Sequence
  Description of Artificial Sequence: Synthetic oligonucleotide
ccaaacataacacaattcattgg

SEQ ID NO: 314 - DNA, 23 bp, Artificial Sequence
  Description of Artificial Sequence: Synthetic oligonucleotide
ccaatgaattgtgttatgtttgg

SEQ ID NO: 315 - DNA, 23 bp, Artificial Sequence
  Description of Artificial Sequence: Synthetic oligonucleotide
caatgaattgtgttatgtttggg

SEQ ID NO: 316 - DNA, 23 bp, Artificial Sequence
  Description of Artificial Sequence: Synthetic oligonucleotide
gaaccctcctaggcaaattgagg

SEQ ID NO: 317 - DNA, 23 bp, Artificial Sequence
  Description of Artificial Sequence: Synthetic oligonucleotide
ttgggtgcctcaatttgcctagg

SEQ ID NO: 318 - DNA, 23 bp, Artificial Sequence
  Description of Artificial Sequence: Synthetic oligonucleotide
ggtgcctcaatttgcctaggagg

SEQ ID NO: 319 - DNA, 23 bp, Artificial Sequence
  Description of Artificial Sequence: Synthetic oligonucleotide
gtgcctcaatttgcctaggaggg

SEQ ID NO: 320 - DNA, 23 bp, Artificial Sequence
  Description of Artificial Sequence: Synthetic oligonucleotide
agaagaaatagaaccctcctagg

SEQ ID NO: 321 - DNA, 23 bp, Artificial Sequence
  Description of Artificial Sequence: Synthetic oligonucleotide
aggatcttctcctgacttagtgg

SEQ ID NO: 322 - DNA, 23 bp, Artificial Sequence
  Description of Artificial Sequence: Synthetic oligonucleotide
tgtatcttcgccactaagtcagg

SEQ ID NO: 323 - DNA, 23 bp, Artificial Sequence
  Description of Artificial Sequence: Synthetic oligonucleotide
ctgttgcagggcatgctataagg

SEQ ID NO: 324 - DNA, 23 bp, Artificial Sequence
  Description of Artificial Sequence: Synthetic oligonucleotide
ttacaggtgacactgttgcaggg

SEQ ID NO: 325 - DNA, 23 bp, Artificial Sequence
  Description of Artificial Sequence: Synthetic oligonucleotide
cttacaggtgacactgttgcagg

SEQ ID NO: 326 - DNA, 23 bp, Artificial Sequence
  Description of Artificial Sequence: Synthetic oligonucleotide
ctgcaacagtgtcacctgtaagg

SEQ ID NO: 327 - DNA, 23 bp, Artificial Sequence
  Description of Artificial Sequence: Synthetic oligonucleotide
tgcaacagtgtcacctgtaaggg

SEQ ID NO: 328 - DNA, 23 bp, Artificial Sequence
  Description of Artificial Sequence: Synthetic oligonucleotide
gtgcagagagatgcccttacagg

SEQ ID NO: 329 - DNA, 23 bp, Artificial Sequence
  Description of Artificial Sequence: Synthetic oligonucleotide
tctctgcacagccacagtgaagg

SEQ ID NO: 330 - DNA, 23 bp, Artificial Sequence
  Description of Artificial Sequence: Synthetic oligonucleotide
cctttgaggatccttcactgtgg

SEQ ID NO: 331 - DNA, 23 bp, Artificial Sequence
  Description of Artificial Sequence: Synthetic oligonucleotide
ccacagtgaaggatcctcaaagg

SEQ ID NO: 332 - DNA, 23 bp, Artificial Sequence
  Description of Artificial Sequence: Synthetic oligonucleotide
gaaagccctcaatacctttgagg

SEQ ID NO: 333 - DNA, 23 bp, Artificial Sequence
  Description of Artificial Sequence: Synthetic oligonucleotide
aaggatcctcaaaggtattgagg

SEQ ID NO: 334 - DNA, 23 bp, Artificial Sequence
  Description of Artificial Sequence: Synthetic oligonucleotide
aggatcctcaaaggtattgaggg

SEQ ID NO: 335 - DNA, 23 bp, Artificial Sequence
  Description of Artificial Sequence: Synthetic oligonucleotide
gctgtaaagatggctcttgatgg

SEQ ID NO: 336 - DNA, 23 bp, Artificial Sequence
  Description of Artificial Sequence: Synthetic oligonucleotide
aaagaggtttgctgtaaagatgg

SEQ ID NO: 337 - DNA, 23 bp, Artificial Sequence
  Description of Artificial Sequence: Synthetic oligonucleotide
tctgggctctgaagggaaagagg

SEQ ID NO: 338 - DNA, 23 bp, Artificial Sequence
  Description of Artificial Sequence: Synthetic oligonucleotide
gcactcttctgggctctgaaggg

SEQ ID NO: 339 - DNA, 23 bp, Artificial Sequence
  Description of Artificial Sequence: Synthetic oligonucleotide
agcactcttctgggctctgaagg

SEQ ID NO: 340 - DNA, 23 bp, Artificial Sequence
  Description of Artificial Sequence: Synthetic oligonucleotide
cagctggtcagcactcttctggg

SEQ ID NO: 341 - DNA, 23 bp, Artificial Sequence
  Description of Artificial Sequence: Synthetic oligonucleotide
ccagctggtcagcactcttctgg

SEQ ID NO: 342 - DNA, 23 bp, Artificial Sequence
  Description of Artificial Sequence: Synthetic oligonucleotide
ccagaagagtgctgaccagctgg

SEQ ID NO: 343 - DNA, 23 bp, Artificial Sequence
  Description of Artificial Sequence: Synthetic oligonucleotide
aaaaaaccctgttttccagctgg

SEQ ID NO: 344 - DNA, 23 bp, Artificial Sequence
  Description of Artificial Sequence: Synthetic oligonucleotide
gtgctgaccagctggaaaacagg

SEQ ID NO: 345 - DNA, 23 bp, Artificial Sequence
  Description of Artificial Sequence: Synthetic oligonucleotide
tgctgaccagctggaaaacaggg

SEQ ID NO: 346 - DNA, 23 bp, Artificial Sequence
  Description of Artificial Sequence: Synthetic oligonucleotide
ggggaagttgatctaatatctgg

SEQ ID NO: 347 - DNA, 23 bp, Artificial Sequence
  Description of Artificial Sequence: Synthetic oligonucleotide
ttgcctgcaggggtatggtgggg

SEQ ID NO: 348 - DNA, 23 bp, Artificial Sequence
  Description of Artificial Sequence: Synthetic oligonucleotide
tttgcctgcaggggtatggtggg

SEQ ID NO: 349 - DNA, 23 bp, Artificial Sequence
  Description of Artificial Sequence: Synthetic oligonucleotide
ctttgcctgcaggggtatggtgg

SEQ ID NO: 350 - DNA, 23 bp, Artificial Sequence
  Description of Artificial Sequence: Synthetic oligonucleotide
aggctttgcctgcaggggtatgg

SEQ ID NO: 351 - DNA, 23 bp, Artificial Sequence
  Description of Artificial Sequence: Synthetic oligonucleotide
cttccccaccatacccctgcagg

SEQ ID NO: 352 - DNA, 23 bp, Artificial Sequence
  Description of Artificial Sequence: Synthetic oligonucleotide
ttaagaggctttgcctgcagggg

SEQ ID NO: 353 - DNA, 23 bp, Artificial Sequence
  Description of Artificial Sequence: Synthetic oligonucleotide
attaagaggctttgcctgcaggg

SEQ ID NO: 354 - DNA, 23 bp, Artificial Sequence
  Description of Artificial Sequence: Synthetic oligonucleotide
aattaagaggctttgcctgcagg

SEQ ID NO: 355 - DNA, 23 bp, Artificial Sequence
  Description of Artificial Sequence: Synthetic oligonucleotide
gctgcaggaagctaattaagagg

SEQ ID NO: 356 - DNA, 23 bp, Artificial Sequence
  Description of Artificial Sequence: Synthetic oligonucleotide
ggcctttccagctgtgctgcagg

SEQ ID NO: 357 - DNA, 23 bp, Artificial Sequence
  Description of Artificial Sequence: Synthetic oligonucleotide
ttagcttcctgcagcacagctgg

SEQ ID NO: 358 - DNA, 23 bp, Artificial Sequence
  Description of Artificial Sequence: Synthetic oligonucleotide
ttcctgcagcacagctggaaagg

SEQ ID NO: 359 - DNA, 23 bp, Artificial Sequence
  Description of Artificial Sequence: Synthetic oligonucleotide
tgcccatcacagattacaatagg

SEQ ID NO: 360 - DNA, 23 bp, Artificial Sequence
  Description of Artificial Sequence: Synthetic oligonucleotide
aggcctattgtaatctgtgatgg

SEQ ID NO: 361 - DNA, 23 bp, Artificial Sequence
  Description of Artificial Sequence: Synthetic oligonucleotide
ggcctattgtaatctgtgatggg

SEQ ID NO: 362 - DNA, 23 bp, Artificial Sequence
  Description of Artificial Sequence: Synthetic oligonucleotide
agagtaatctaagaagtcacagg

SEQ ID NO: 363 - DNA, 23 bp, Artificial Sequence
  Description of Artificial Sequence: Synthetic oligonucleotide
tccagattctactgggacagggg

SEQ ID NO: 364 - DNA, 23 bp, Artificial Sequence
  Description of Artificial Sequence: Synthetic oligonucleotide
atccagattctactgggacaggg

SEQ ID NO: 365 - DNA, 23 bp, Artificial Sequence
  Description of Artificial Sequence: Synthetic oligonucleotide
catccagattctactgggacagg

SEQ ID NO: 366 - DNA, 23 bp, Artificial Sequence
  Description of Artificial Sequence: Synthetic oligonucleotide
ctgcgcatccagattctactggg

SEQ ID NO: 367 - DNA, 23 bp, Artificial Sequence
  Description of Artificial Sequence: Synthetic oligonucleotide
cctgcgcatccagattctactgg

SEQ ID NO: 368 - DNA, 23 bp, Artificial Sequence
  Description of Artificial Sequence: Synthetic oligonucleotide
acccctgtcccagtagaatctgg

SEQ ID NO: 369 - DNA, 23 bp, Artificial Sequence
  Description of Artificial Sequence: Synthetic oligonucleotide
ccagtagaatctggatgcgcagg

SEQ ID NO: 370 - DNA, 23 bp, Artificial Sequence
  Description of Artificial Sequence: Synthetic oligonucleotide
atgcgcaggcacatgaaccatgg

SEQ ID NO: 371 - DNA, 23 bp, Artificial Sequence
  Description of Artificial Sequence: Synthetic oligonucleotide
tgcctgcaaccattttgccatgg

SEQ ID NO: 372 - DNA, 23 bp, Artificial Sequence
  Description of Artificial Sequence: Synthetic oligonucleotide
gcacatgaaccatggcaaaatgg

SEQ ID NO: 373 - DNA, 23 bp, Artificial Sequence
  Description of Artificial Sequence: Synthetic oligonucleotide
aaccatggcaaaatggttgcagg

SEQ ID NO: 374 - DNA, 23 bp, Artificial Sequence
  Description of Artificial Sequence: Synthetic oligonucleotide
gcagccctgtggcattaacaggg

SEQ ID NO: 375 - DNA, 23 bp, Artificial Sequence
  Description of Artificial Sequence: Synthetic oligonucleotide
ggcagccctgtggcattaacagg

SEQ ID NO: 376 - DNA, 23 bp, Artificial Sequence
  Description of Artificial Sequence: Synthetic oligonucleotide
actgtccctgttaatgccacagg

SEQ ID NO: 377 - DNA, 23 bp, Artificial Sequence
  Description of Artificial Sequence: Synthetic oligonucleotide
ctgtccctgttaatgccacaggg

SEQ ID NO: 378 - DNA, 23 bp, Artificial Sequence
  Description of Artificial Sequence: Synthetic oligonucleotide
tgccaggccaggcagccctgtgg

SEQ ID NO: 379 - DNA, 23 bp, Artificial Sequence
  Description of Artificial Sequence: Synthetic oligonucleotide
gttaatgccacagggctgcctgg

SEQ ID NO: 380 - DNA, 23 bp, Artificial Sequence
  Description of Artificial Sequence: Synthetic oligonucleotide
tgccacagggctgcctggcctgg

SEQ ID NO: 381 - DNA, 23 bp, Artificial Sequence
  Description of Artificial Sequence: Synthetic oligonucleotide
acagccctgtgtgccaggccagg

SEQ ID NO: 382 - DNA, 23 bp, Artificial Sequence
  Description of Artificial Sequence: Synthetic oligonucleotide
gcgccacagccctgtgtgccagg

SEQ ID NO: 383 - DNA, 23 bp, Artificial Sequence
  Description of Artificial Sequence: Synthetic oligonucleotide
ggctgcctggcctggcacacagg

SEQ ID NO: 384 - DNA, 23 bp, Artificial Sequence
  Description of Artificial Sequence: Synthetic oligonucleotide
gctgcctggcctggcacacaggg

SEQ ID NO: 385 - DNA, 23 bp, Artificial Sequence
  Description of Artificial Sequence: Synthetic oligonucleotide
tggcctggcacacagggctgtgg

SEQ ID NO: 386 - DNA, 23 bp, Artificial Sequence
  Description of Artificial Sequence: Synthetic oligonucleotide
caacgttatccatttgcacaagg

SEQ ID NO: 387 - DNA, 23 bp, Artificial Sequence
  Description of Artificial Sequence: Synthetic oligonucleotide
gctgtggcgccttgtgcaaatgg

SEQ ID NO: 388 - DNA, 23 bp, Artificial Sequence
  Description of Artificial Sequence: Synthetic oligonucleotide
tttcactttgaatgaaaggctgg

SEQ ID NO: 389 - DNA, 23 bp, Artificial Sequence
  Description of Artificial Sequence: Synthetic oligonucleotide
cagttttcactttgaatgaaagg

SEQ ID NO: 390 - DNA, 23 bp, Artificial Sequence
  Description of Artificial Sequence: Synthetic oligonucleotide
caaagtgaaaactgttagaaagg

SEQ ID NO: 391 - DNA, 23 bp, Artificial Sequence
  Description of Artificial Sequence: Synthetic oligonucleotide
aaagtgaaaactgttagaaaggg

SEQ ID NO: 392 - DNA, 23 bp, Artificial Sequence
  Description of Artificial Sequence: Synthetic oligonucleotide
tgaaaactgttagaaagggaagg

SEQ ID NO: 393 - DNA, 23 bp, Artificial Sequence
  Description of Artificial Sequence: Synthetic oligonucleotide
aggaaaactttgctattttaagg

SEQ ID NO: 394 - DNA, 23 bp, Artificial Sequence
  Description of Artificial Sequence: Synthetic oligonucleotide
gttatttcttccttcatatcagg

SEQ ID NO: 395 - DNA, 23 bp, Artificial Sequence
  Description of Artificial Sequence: Synthetic oligonucleotide
tagcgtgctgcctgatatgaagg

SEQ ID NO: 396 - DNA, 23 bp, Artificial Sequence
  Description of Artificial Sequence: Synthetic oligonucleotide
tcgagtgctgcgcacaagcaagg

SEQ ID NO: 397 - DNA, 23 bp, Artificial Sequence
  Description of Artificial Sequence: Synthetic oligonucleotide
ggtgaggtcgaaagcaaaagcgg

SEQ ID NO: 398 - DNA, 23 bp, Artificial Sequence
  Description of Artificial Sequence: Synthetic oligonucleotide
gatctcactgtgttgtggtgagg

SEQ ID NO: 399 - DNA, 23 bp, Artificial Sequence
  Description of Artificial Sequence: Synthetic oligonucleotide
cagtagatctcactgtgttgtgg

SEQ ID NO: 400 - DNA, 23 bp, Artificial Sequence
  Description of Artificial Sequence: Synthetic oligonucleotide
agtttcacctcctgtaaaatggg

SEQ ID NO: 401 - DNA, 23 bp, Artificial Sequence
  Description of Artificial Sequence: Synthetic oligonucleotide
tgttcatgttcccattttacagg

SEQ ID NO: 402 - DNA, 23 bp, Artificial Sequence
  Description of Artificial Sequence: Synthetic oligonucleotide
cagtttcacctcctgtaaaatgg

SEQ ID NO: 403 - DNA, 23 bp, Artificial Sequence
  Description of Artificial Sequence: Synthetic oligonucleotide
tcatgttcccattttacaggagg

SEQ ID NO: 404 - DNA, 23 bp, Artificial Sequence
  Description of Artificial Sequence: Synthetic oligonucleotide
ggtgaaactgcagcttagtgagg

SEQ ID NO: 405 - DNA, 23 bp, Artificial Sequence
  Description of Artificial Sequence: Synthetic oligonucleotide
gttcagacacagaatgctgttgg

SEQ ID NO: 406 - DNA, 23 bp, Artificial Sequence
  Description of Artificial Sequence: Synthetic oligonucleotide
ttcagacacagaatgctgttggg

SEQ ID NO: 407 - DNA, 23 bp, Artificial Sequence
  Description of Artificial Sequence: Synthetic oligonucleotide
ggagagtaataactatgatatgg

SEQ ID NO: 408 - DNA, 23 bp, Artificial Sequence
  Description of Artificial Sequence: Synthetic oligonucleotide
atagcaacacagatatagctggg

SEQ ID NO: 409 - DNA, 23 bp, Artificial Sequence
  Description of Artificial Sequence: Synthetic oligonucleotide
tatagcaacacagatatagctgg

SEQ ID NO: 410 - DNA, 23 bp, Artificial Sequence
  Description of Artificial Sequence: Synthetic oligonucleotide
agctatatctgtgttgctatagg

SEQ ID NO: 411 - DNA, 23 bp, Artificial Sequence
  Description of Artificial Sequence: Synthetic oligonucleotide
gctatatctgtgttgctataggg

SEQ ID NO: 412 - DNA, 23 bp, Artificial Sequence
  Description of Artificial Sequence: Synthetic oligonucleotide
tatctgtgttgctatagggaagg

SEQ ID NO: 413 - DNA, 23 bp, Artificial Sequence
  Description of Artificial Sequence: Synthetic oligonucleotide
atctgtgttgctatagggaaggg

SEQ ID NO: 414 - DNA, 23 bp, Artificial Sequence
  Description of Artificial Sequence: Synthetic oligonucleotide
tctgtgttgctatagggaagggg

SEQ ID NO: 415 - DNA, 23 bp, Artificial Sequence
  Description of Artificial Sequence: Synthetic oligonucleotide
agtttttggtggttgatgtttgg

SEQ ID NO: 416 - DNA, 23 bp, Artificial Sequence
  Description of Artificial Sequence: Synthetic oligonucleotide
aaattcagttcagtttttggtgg

SEQ ID NO: 417 - DNA, 23 bp, Artificial Sequence
  Description of Artificial Sequence: Synthetic oligonucleotide
aggaaattcagttcagtttttgg

SEQ ID NO: 418 - DNA, 23 bp, Artificial Sequence
  Description of Artificial Sequence: Synthetic oligonucleotide
atttgaaaaccaagtgcttcagg

SEQ ID NO: 419 - DNA, 23 bp, Artificial Sequence
  Description of Artificial Sequence: Synthetic oligonucleotide
actgaatttcctgaagcacttgg

SEQ ID NO: 420 - DNA, 23 bp, Artificial Sequence
  Description of Artificial Sequence: Synthetic oligonucleotide
catcaatgctgttattcttgagg

SEQ ID NO: 421 - DNA, 23 bp, Artificial Sequence
  Description of Artificial Sequence: Synthetic oligonucleotide
gaaatgagcaagttgcttctggg

SEQ ID NO: 422 - DNA, 23 bp, Artificial Sequence
  Description of Artificial Sequence: Synthetic oligonucleotide
tgaaatgagcaagttgcttctgg

SEQ ID NO: 423 - DNA, 23 bp, Artificial Sequence
  Description of Artificial Sequence: Synthetic oligonucleotide
tgtgggtgggctgtgtacatagg

SEQ ID NO: 424 - DNA, 23 bp, Artificial Sequence
  Description of Artificial Sequence: Synthetic oligonucleotide
tcacatcggggagtgtgggtggg

SEQ ID NO: 425 - DNA, 23 bp, Artificial Sequence
  Description of Artificial Sequence: Synthetic oligonucleotide
ctcacatcggggagtgtgggtgg

SEQ ID NO: 426 - DNA, 23 bp, Artificial Sequence
  Description of Artificial Sequence: Synthetic oligonucleotide
cttctcacatcggggagtgtggg

SEQ ID NO: 427 - DNA, 23 bp, Artificial Sequence
  Description of Artificial Sequence: Synthetic oligonucleotide
ccttctcacatcggggagtgtgg

SEQ ID NO: 428 - DNA, 23 bp, Artificial Sequence
  Description of Artificial Sequence: Synthetic oligonucleotide
accctctccttctcacatcgggg

SEQ ID NO: 429 - DNA, 23 bp, Artificial Sequence
  Description of Artificial Sequence: Synthetic oligonucleotide
gaccctctccttctcacatcggg

SEQ ID NO: 430 - DNA, 23 bp, Artificial Sequence
  Description of Artificial Sequence: Synthetic oligonucleotide
tgaccctctccttctcacatcgg

SEQ ID NO: 431 - DNA, 23 bp, Artificial Sequence
  Description of Artificial Sequence: Synthetic oligonucleotide
ccacactccccgatgtgagaagg

SEQ ID NO: 432 - DNA, 23 bp, Artificial Sequence
  Description of Artificial Sequence: Synthetic oligonucleotide
ctccccgatgtgagaaggagagg

SEQ ID NO: 433 - DNA, 23 bp, Artificial Sequence
  Description of Artificial Sequence: Synthetic oligonucleotide
tccccgatgtgagaaggagaggg

SEQ ID NO: 434 - DNA, 23 bp, Artificial Sequence
  Description of Artificial Sequence: Synthetic oligonucleotide
gcagcagcagaggctgggggcgg

SEQ ID NO: 435 - DNA, 23 bp, Artificial Sequence
  Description of Artificial Sequence: Synthetic oligonucleotide
gtggcagcagcagaggctggggg

SEQ ID NO: 436 - DNA, 23 bp, Artificial Sequence
  Description of Artificial Sequence: Synthetic oligonucleotide
tgtggcagcagcagaggctgggg

SEQ ID NO: 437 - DNA, 23 bp, Artificial Sequence
  Description of Artificial Sequence: Synthetic oligonucleotide
ttgtggcagcagcagaggctggg

SEQ ID NO: 438 - DNA, 23 bp, Artificial Sequence
  Description of Artificial Sequence: Synthetic oligonucleotide
cttgtggcagcagcagaggctgg

SEQ ID NO: 439 - DNA, 23 bp, Artificial Sequence
  Description of Artificial Sequence: Synthetic oligonucleotide
tgtccttgtggcagcagcagagg

SEQ ID NO: 440 - DNA, 23 bp, Artificial Sequence
  Description of Artificial Sequence: Synthetic oligonucleotide
cagcctctgctgctgccacaagg

SEQ ID NO: 441 - DNA, 23 bp, Artificial Sequence
  Description of Artificial Sequence: Synthetic oligonucleotide
ttccactgctgctgtccttgtgg

SEQ ID NO: 442 - DNA, 23 bp, Artificial Sequence
  Description of Artificial Sequence: Synthetic oligonucleotide
tgccacaaggacagcagcagtgg

SEQ ID NO: 443 - DNA, 23 bp, Artificial Sequence
  Description of Artificial Sequence: Synthetic oligonucleotide
gcagtggaaacattcagcaaagg

SEQ ID NO: 444 - DNA, 23 bp, Artificial Sequence
  Description of Artificial Sequence: Synthetic oligonucleotide
aacattcagcaaaggaatgttgg

SEQ ID NO: 445 - DNA, 23 bp, Artificial Sequence
  Description of Artificial Sequence: Synthetic oligonucleotide
cagtgagtctcttgtggatgtgg

SEQ ID NO: 446 - DNA, 23 bp, Artificial Sequence
  Description of Artificial Sequence: Synthetic oligonucleotide
aatcttcagtgagtctcttgtgg

SEQ ID NO: 447 - DNA, 23 bp, Artificial Sequence
  Description of Artificial Sequence: Synthetic oligonucleotide
tgccactttccgtaggcgtttgg

SEQ ID NO: 448 - DNA, 23 bp, Artificial Sequence
  Description of Artificial Sequence: Synthetic oligonucleotide
gaagattcgccaaacgcctacgg

SEQ ID NO: 449 - DNA, 23 bp, Artificial Sequence
  Description of Artificial Sequence: Synthetic oligonucleotide
aattccctgccactttccgtagg

SEQ ID NO: 450 - DNA, 23 bp, Artificial Sequence
  Description of Artificial Sequence: Synthetic oligonucleotide
cgccaaacgcctacggaaagtgg

SEQ ID NO: 451 - DNA, 23 bp, Artificial Sequence
  Description of Artificial Sequence: Synthetic oligonucleotide
aaacgcctacggaaagtggcagg

SEQ ID NO: 452 - DNA, 23 bp, Artificial Sequence
  Description of Artificial Sequence: Synthetic oligonucleotide
aacgcctacggaaagtggcaggg

SEQ ID NO: 453 - DNA, 23 bp, Artificial Sequence
  Description of Artificial Sequence: Synthetic oligonucleotide
gctcttcaatctgatcaagcagg

SEQ ID NO: 454 - DNA, 23 bp, Artificial Sequence
  Description of Artificial Sequence: Synthetic oligonucleotide
tgatcagattgaagagcttctgg

SEQ ID NO: 455 - DNA, 23 bp, Artificial Sequence
  Description of Artificial Sequence: Synthetic oligonucleotide
gatcagattgaagagcttctggg

SEQ ID NO: 456 - DNA, 23 bp, Artificial Sequence
  Description of Artificial Sequence: Synthetic oligonucleotide
gggattctgtaacaataaatagg

SEQ ID NO: 457 - DNA, 23 bp, Artificial Sequence
  Description of Artificial Sequence: Synthetic oligonucleotide
tctgtaacaataaataggaccgg

SEQ ID NO: 458 - DNA, 23 bp, Artificial Sequence
  Description of Artificial Sequence: Synthetic oligonucleotide
ctgtaacaataaataggaccggg

SEQ ID NO: 459 - DNA, 23 bp, Artificial Sequence
  Description of Artificial Sequence: Synthetic oligonucleotide
tgtaacaataaataggaccgggg

SEQ ID NO: 460 - DNA, 23 bp, Artificial Sequence
  Description of Artificial Sequence: Synthetic oligonucleotide
gtaacaataaataggaccggggg

SEQ ID NO: 461 - DNA, 23 bp, Artificial Sequence
  Description of Artificial Sequence: Synthetic oligonucleotide
caataaataggaccgggggctgg

SEQ ID NO: 462 - DNA, 23 bp, Artificial Sequence
  Description of Artificial Sequence: Synthetic oligonucleotide
gctggccatactccagcccccgg

SEQ ID NO: 463 - DNA, 23 bp, Artificial Sequence
  Description of Artificial Sequence: Synthetic oligonucleotide
taggaccgggggctggagtatgg

SEQ ID NO: 464 - DNA, 23 bp, Artificial Sequence
  Description of Artificial Sequence: Synthetic oligonucleotide
gggctggagtatggccagcaagg

SEQ ID NO: 465 - DNA, 23 bp, Artificial Sequence
  Description of Artificial Sequence: Synthetic oligonucleotide
aacccctgaagagtccttgctgg

SEQ ID NO: 466 - DNA, 23 bp, Artificial Sequence
  Description of Artificial Sequence: Synthetic oligonucleotide
atggccagcaaggactcttcagg

SEQ ID NO: 467 - DNA, 23 bp, Artificial Sequence
  Description of Artificial Sequence: Synthetic oligonucleotide
tggccagcaaggactcttcaggg

SEQ ID NO: 468 - DNA, 23 bp, Artificial Sequence
  Description of Artificial Sequence: Synthetic oligonucleotide
ggccagcaaggactcttcagggg

SEQ ID NO: 469 - DNA, 23 bp, Artificial Sequence
  Description of Artificial Sequence: Synthetic oligonucleotide
ggactcttcaggggttattcagg

SEQ ID NO: 470 - DNA, 23 bp, Artificial Sequence
  Description of Artificial Sequence: Synthetic oligonucleotide
gactcttcaggggttattcaggg

SEQ ID NO: 471 - DNA, 23 bp, Artificial Sequence
  Description of Artificial Sequence: Synthetic oligonucleotide
gtttgctgcctaggattcacagg

SEQ ID NO: 472 - DNA, 23 bp, Artificial Sequence
  Description of Artificial Sequence: Synthetic oligonucleotide
ctgtctaacctgtgaatcctagg

SEQ ID NO: 473 - DNA, 23 bp, Artificial Sequence
  Description of Artificial Sequence: Synthetic oligonucleotide
ctggtttctgtttgctgcctagg

SEQ ID NO: 474 - DNA, 23 bp, Artificial Sequence
  Description of Artificial Sequence: Synthetic oligonucleotide
ctaggcagcaaacagaaaccagg

SEQ ID NO: 475 - DNA, 23 bp, Artificial Sequence
  Description of Artificial Sequence: Synthetic oligonucleotide
cctccagatttctgaatacctgg

SEQ ID NO: 476 - DNA, 23 bp, Artificial Sequence
  Description of Artificial Sequence: Synthetic oligonucleotide
aaaccaggtattcagaaatctgg

SEQ ID NO: 477 - DNA, 23 bp, Artificial Sequence
  Description of Artificial Sequence: Synthetic oligonucleotide
ccaggtattcagaaatctggagg

SEQ ID NO: 478 - DNA, 23 bp, Artificial Sequence
  Description of Artificial Sequence: Synthetic oligonucleotide
attcagaaatctggaggatttgg

SEQ ID NO: 479 - DNA, 23 bp, Artificial Sequence
  Description of Artificial Sequence: Synthetic oligonucleotide
gaaatctggaggatttggtcagg

SEQ ID NO: 480 - DNA, 23 bp, Artificial Sequence
  Description of Artificial Sequence: Synthetic oligonucleotide
ggatttggtcaggcccagctagg

SEQ ID NO: 481 - DNA, 23 bp, Artificial Sequence
  Description of Artificial Sequence: Synthetic oligonucleotide
atgcctccctagtcctagctggg

SEQ ID NO: 482 - DNA, 23 bp, Artificial Sequence
  Description of Artificial Sequence: Synthetic oligonucleotide
catgcctccctagtcctagctgg

SEQ ID NO: 483 - DNA, 23 bp, Artificial Sequence
  Description of Artificial Sequence: Synthetic oligonucleotide
ggtcaggcccagctaggactagg

SEQ ID NO: 484 - DNA, 23 bp, Artificial Sequence
  Description of Artificial Sequence: Synthetic oligonucleotide
gtcaggcccagctaggactaggg

SEQ ID NO: 485 - DNA, 23 bp, Artificial Sequence
  Description of Artificial Sequence: Synthetic oligonucleotide
aggcccagctaggactagggagg

SEQ ID NO: 486 - DNA, 23 bp, Artificial Sequence
  Description of Artificial Sequence: Synthetic oligonucleotide
cagctaggactagggaggcatgg

SEQ ID NO: 487 - DNA, 23 bp, Artificial Sequence
  Description of Artificial Sequence: Synthetic oligonucleotide
agctaggactagggaggcatggg

SEQ ID NO: 488 - DNA, 23 bp, Artificial Sequence
  Description of Artificial Sequence: Synthetic oligonucleotide
agggaggcatgggcctctgctgg

SEQ ID NO: 489 - DNA, 23 bp, Artificial Sequence
  Description of Artificial Sequence: Synthetic oligonucleotide
gaagggaccacagccagcagagg

SEQ ID NO: 490 - DNA, 23 bp, Artificial Sequence
  Description of Artificial Sequence: Synthetic oligonucleotide
gcatgggcctctgctggctgtgg

SEQ ID NO: 491 - DNA, 23 bp, Artificial Sequence
  Description of Artificial Sequence: Synthetic oligonucleotide
gagaagtgaaggctggagaaggg

SEQ ID NO: 492 - DNA, 23 bp, Artificial Sequence
  Description of Artificial Sequence: Synthetic oligonucleotide
agagaagtgaaggctggagaagg

SEQ ID NO: 493 - DNA, 23 bp, Artificial Sequence
  Description of Artificial Sequence: Synthetic oligonucleotide
gggacaagagaagtgaaggctgg

SEQ ID NO: 494 - DNA, 23 bp, Artificial Sequence
  Description of Artificial Sequence: Synthetic oligonucleotide
tctagggacaagagaagtgaagg

SEQ ID NO: 495 - DNA, 23 bp, Artificial Sequence
  Description of Artificial Sequence: Synthetic oligonucleotide
tgaatccatgtaaggatctaggg

SEQ ID NO: 496 - DNA, 23 bp, Artificial Sequence
  Description of Artificial Sequence: Synthetic oligonucleotide
atgaatccatgtaaggatctagg

SEQ ID NO: 497 - DNA, 23 bp, Artificial Sequence
  Description of Artificial Sequence: Synthetic oligonucleotide
cttgtccctagatccttacatgg

SEQ ID NO: 498 - DNA, 23 bp, Artificial Sequence
  Description of Artificial Sequence: Synthetic oligonucleotide
agcattaatgaatccatgtaagg

SEQ ID NO: 499 - DNA, 23 bp, Artificial Sequence
  Description of Artificial Sequence: Synthetic oligonucleotide
ttaatgctcattgtccctcctgg

SEQ ID NO: 500 - DNA, 23 bp, Artificial Sequence
  Description of Artificial Sequence: Synthetic oligonucleotide
taatgctcattgtccctcctggg

SEQ ID NO: 501 - DNA, 23 bp, Artificial Sequence
  Description of Artificial Sequence: Synthetic oligonucleotide
gaaagtgagtgggcccaggaggg

SEQ ID NO: 502 - DNA, 23 bp, Artificial Sequence
  Description of Artificial Sequence: Synthetic oligonucleotide
tgaaagtgagtgggcccaggagg

SEQ ID NO: 503 - DNA, 23 bp, Artificial Sequence
  Description of Artificial Sequence: Synthetic oligonucleotide
aggtgaaagtgagtgggcccagg

SEQ ID NO: 504 - DNA, 23 bp, Artificial Sequence
  Description of Artificial Sequence: Synthetic oligonucleotide
ttcaacaggtgaaagtgagtggg

SEQ ID NO: 505 - DNA, 23 bp, Artificial Sequence
  Description of Artificial Sequence: Synthetic oligonucleotide
gttcaacaggtgaaagtgagtgg

SEQ ID NO: 506 - DNA, 23 bp, Artificial Sequence
  Description of Artificial Sequence: Synthetic oligonucleotide
tggccagttttttgttcaacagg

SEQ ID NO: 507 - DNA, 23 bp, Artificial Sequence
  Description of Artificial Sequence: Synthetic oligonucleotide
tcacctgttgaacaaaaaactgg

SEQ ID NO: 508 - DNA, 23 bp, Artificial Sequence
  Description of Artificial Sequence: Synthetic oligonucleotide
tgaacaaaaaactggccaagagg

SEQ ID NO: 509 - DNA, 23 bp, Artificial Sequence
  Description of Artificial Sequence: Synthetic oligonucleotide
gtgatatgactgtcacctcttgg

SEQ ID NO: 510 - DNA, 23 bp, Artificial Sequence
  Description of Artificial Sequence: Synthetic oligonucleotide
tctctgccctgtctcttctgcgg

SEQ ID NO: 511 - DNA, 23 bp, Artificial Sequence
  Description of Artificial Sequence: Synthetic oligonucleotide
catatcaccgcagaagagacagg

SEQ ID NO: 512 - DNA, 23 bp, Artificial Sequence
  Description of Artificial Sequence: Synthetic oligonucleotide
atatcaccgcagaagagacaggg

SEQ ID NO: 513 - DNA, 23 bp, Artificial Sequence
  Description of Artificial Sequence: Synthetic oligonucleotide
gagacagggcagagaaatgaagg

SEQ ID NO: 514 - DNA, 23 bp, Artificial Sequence
  Description of Artificial Sequence: Synthetic oligonucleotide
agacagggcagagaaatgaaggg

SEQ ID NO: 515 - DNA, 23 bp, Artificial Sequence
  Description of Artificial Sequence: Synthetic oligonucleotide
gacagggcagagaaatgaagggg

SEQ ID NO: 516 - DNA, 23 bp, Artificial Sequence
  Description of Artificial Sequence: Synthetic oligonucleotide
agagaaatgaaggggcagaatgg

SEQ ID NO: 517 - DNA, 23 bp, Artificial Sequence
  Description of Artificial Sequence: Synthetic oligonucleotide
tcagagtcaggcttttgggtggg

SEQ ID NO: 518 - DNA, 23 bp, Artificial Sequence
  Description of Artificial Sequence: Synthetic oligonucleotide
ttcagagtcaggcttttgggtgg

SEQ ID NO: 519 - DNA, 23 bp, Artificial Sequence
  Description of Artificial Sequence: Synthetic oligonucleotide
atattcagagtcaggcttttggg

SEQ ID NO: 520 - DNA, 23 bp, Artificial Sequence
  Description of Artificial Sequence: Synthetic oligonucleotide
aatattcagagtcaggcttttgg

SEQ ID NO: 521 - DNA, 23 bp, Artificial Sequence
  Description of Artificial Sequence: Synthetic oligonucleotide
attctcaaatattcagagtcagg

SEQ ID NO: 522 - DNA, 23 bp, Artificial Sequence
  Description of Artificial Sequence: Synthetic oligonucleotide
aattgttcaagttcctgcagagg

SEQ ID NO: 523 - DNA, 23 bp, Artificial Sequence
  Description of Artificial Sequence: Synthetic oligonucleotide
ccccatcatgattcctctgcagg

SEQ ID NO: 524 - DNA, 23 bp, Artificial Sequence
  Description of Artificial Sequence: Synthetic oligonucleotide
ttcctgcagaggaatcatgatgg

SEQ ID NO: 525 - DNA, 23 bp, Artificial Sequence
  Description of Artificial Sequence: Synthetic oligonucleotide
tcctgcagaggaatcatgatggg

SEQ ID NO: 526 - DNA, 23 bp, Artificial Sequence
  Description of Artificial Sequence: Synthetic oligonucleotide
cctgcagaggaatcatgatgggg

SEQ ID NO: 527 - DNA, 23 bp, Artificial Sequence
  Description of Artificial Sequence: Synthetic oligonucleotide
ggaatcatgatggggacagtagg

SEQ ID NO: 528 - DNA, 23 bp, Artificial Sequence
  Description of Artificial Sequence: Synthetic oligonucleotide
tgtagtttttactgcaatattgg

SEQ ID NO: 529 - DNA, 23 bp, Artificial Sequence
  Description of Artificial Sequence: Synthetic oligonucleotide
tgcacatcaagtgatgtctgtgg

SEQ ID NO: 530 - DNA, 23 bp, Artificial Sequence
  Description of Artificial Sequence: Synthetic oligonucleotide
catcaagtgatgtctgtggatgg

SEQ ID NO: 531 - DNA, 23 bp, Artificial Sequence
  Description of Artificial Sequence: Synthetic oligonucleotide
gatggcattcttaaagtaacagg

SEQ ID NO: 532 - DNA, 23 bp, Artificial Sequence
  Description of Artificial Sequence: Synthetic oligonucleotide
atggcattcttaaagtaacaggg

SEQ ID NO: 533 - DNA, 23 bp, Artificial Sequence
  Description of Artificial Sequence: Synthetic oligonucleotide
taaagaaatacttcatcctttgg

SEQ ID NO: 534 - DNA, 23 bp, Artificial Sequence
  Description of Artificial Sequence: Synthetic oligonucleotide
aaagaaatacttcatcctttggg

SEQ ID NO: 535 - DNA, 23 bp, Artificial Sequence
  Description of Artificial Sequence: Synthetic oligonucleotide
gaacttcaggtatcacccaaagg

SEQ ID NO: 536 - DNA, 23 bp, Artificial Sequence
  Description of Artificial Sequence: Synthetic oligonucleotide
ctccaagctcagagaacttcagg

SEQ ID NO: 537 - DNA, 23 bp, Artificial Sequence
  Description of Artificial Sequence: Synthetic oligonucleotide
tacctgaagttctctgagcttgg

SEQ ID NO: 538 - DNA, 23 bp, Artificial Sequence
  Description of Artificial Sequence: Synthetic oligonucleotide
ctgaagttctctgagcttggagg

SEQ ID NO: 539 - DNA, 23 bp, Artificial Sequence
  Description of Artificial Sequence: Synthetic oligonucleotide
aataaaacaaacaatactgaggg

SEQ ID NO: 540 - DNA, 23 bp, Artificial Sequence
  Description of Artificial Sequence: Synthetic oligonucleotide
aaataaaacaaacaatactgagg

SEQ ID NO: 541 - DNA, 23 bp, Artificial Sequence
  Description of Artificial Sequence: Synthetic oligonucleotide
ctgactgaatcacaagtcagagg

SEQ ID NO: 542 - DNA, 23 bp, Artificial Sequence
  Description of Artificial Sequence: Synthetic oligonucleotide
gtcagatgcatgcctgcctctgg

SEQ ID NO: 543 - DNA, 23 bp, Artificial Sequence
  Description of Artificial Sequence: Synthetic oligonucleotide
gatcttcctgagccagaggcagg

SEQ ID NO: 544 - DNA, 23 bp, Artificial Sequence
  Description of Artificial Sequence: Synthetic oligonucleotide
ggttgatcttcctgagccagagg

SEQ ID NO: 545 - DNA, 23 bp, Artificial Sequence
  Description of Artificial Sequence: Synthetic oligonucleotide
tgcatgcctgcctctggctcagg

SEQ ID NO: 546 - DNA, 23 bp, Artificial Sequence
  Description of Artificial Sequence: Synthetic oligonucleotide
aggcgtggtcagtcaggagaggg

SEQ ID NO: 547 - DNA, 23 bp, Artificial Sequence
  Description of Artificial Sequence: Synthetic oligonucleotide
gaggcgtggtcagtcaggagagg

SEQ ID NO: 548 - DNA, 23 bp, Artificial Sequence
  Description of Artificial Sequence: Synthetic oligonucleotide
caggagaggcgtggtcagtcagg

SEQ ID NO: 549 - DNA, 23 bp, Artificial Sequence
  Description of Artificial Sequence: Synthetic oligonucleotide
gtggtcagtcaggagaggcgtgg

SEQ ID NO: 550 - DNA, 23 bp, Artificial Sequence
  Description of Artificial Sequence: Synthetic oligonucleotide
gctacgtggtcagtcaggagagg

SEQ ID NO: 551 - DNA, 23 bp, Artificial Sequence
  Description of Artificial Sequence: Synthetic oligonucleotide
gctgtgctacgtggtcagtcagg

SEQ ID NO: 552 - DNA, 23 bp, Artificial Sequence
  Description of Artificial Sequence: Synthetic oligonucleotide
aaggaagctgctgtgctacgtgg

SEQ ID NO: 553 - DNA, 23 bp, Artificial Sequence
  Description of Artificial Sequence: Synthetic oligonucleotide
cacagcagcttcctttccctagg

SEQ ID NO: 554 - DNA, 23 bp, Artificial Sequence
  Description of Artificial Sequence: Synthetic oligonucleotide
cattaggagcccctagggaaagg

SEQ ID NO: 555 - DNA, 23 bp, Artificial Sequence
  Description of Artificial Sequence: Synthetic oligonucleotide
acagcagcttcctttccctaggg

SEQ ID NO: 556 - DNA, 23 bp, Artificial Sequence
  Description of Artificial Sequence: Synthetic oligonucleotide
cagcagcttcctttccctagggg

SEQ ID NO: 557 - DNA, 23 bp, Artificial Sequence
  Description of Artificial Sequence: Synthetic oligonucleotide
agcttcattaggagcccctaggg

SEQ ID NO: 558 - DNA, 23 bp, Artificial Sequence
  Description of Artificial Sequence: Synthetic oligonucleotide
aagcttcattaggagcccctagg

SEQ ID NO: 559 - DNA, 23 bp, Artificial Sequence
  Description of Artificial Sequence: Synthetic oligonucleotide
gtgattgtgaaagcttcattagg

SEQ ID NO: 560 - DNA, 23 bp, Artificial Sequence
  Description of Artificial Sequence: Synthetic oligonucleotide
atgaagctttcacaatcacctgg

SEQ ID NO: 561 - DNA, 23 bp, Artificial Sequence
  Description of Artificial Sequence: Synthetic oligonucleotide
acccaaactgtgctcaggccagg

SEQ ID NO: 562 - DNA, 23 bp, Artificial Sequence
  Description of Artificial Sequence: Synthetic oligonucleotide
tcctgacccaaactgtgctcagg

SEQ ID NO: 563 - DNA, 23 bp, Artificial Sequence
  Description of Artificial Sequence: Synthetic oligonucleotide
cacctggcctgagcacagtttgg

SEQ ID NO: 564 - DNA, 23 bp, Artificial Sequence
  Description of Artificial Sequence: Synthetic oligonucleotide
acctggcctgagcacagtttggg

SEQ ID NO: 565 - DNA, 23 bp, Artificial Sequence
  Description of Artificial Sequence: Synthetic oligonucleotide
gcctgagcacagtttgggtcagg

SEQ ID NO: 566 - DNA, 23 bp, Artificial Sequence
  Description of Artificial Sequence: Synthetic oligonucleotide
gcacagtttgggtcaggacttgg

SEQ ID NO: 567 - DNA, 23 bp, Artificial Sequence
  Description of Artificial Sequence: Synthetic oligonucleotide
tttccagaaccacaggattttgg

SEQ ID NO: 568 - DNA, 23 bp, Artificial Sequence
  Description of Artificial Sequence: Synthetic oligonucleotide
catgcaaaaccaaaatcctgtgg

SEQ ID NO: 569 - DNA, 23 bp, Artificial Sequence
  Description of Artificial Sequence: Synthetic oligonucleotide
gaagccttttccagaaccacagg

SEQ ID NO: 570 - DNA, 23 bp, Artificial Sequence
  Description of Artificial Sequence: Synthetic oligonucleotide
aaaccaaaatcctgtggttctgg

SEQ ID NO: 571 - DNA, 23 bp, Artificial Sequence
  Description of Artificial Sequence: Synthetic oligonucleotide
aaatcctgtggttctggaaaagg

SEQ ID NO: 572 - DNA, 23 bp, Artificial Sequence
  Description of Artificial Sequence: Synthetic oligonucleotide
agcagagtgtaaatgtctggggg

SEQ ID NO: 573 - DNA, 23 bp, Artificial Sequence
  Description of Artificial Sequence: Synthetic oligonucleotide
aagcagagtgtaaatgtctgggg

SEQ ID NO: 574 - DNA, 23 bp, Artificial Sequence
  Description of Artificial Sequence: Synthetic oligonucleotide
aaagcagagtgtaaatgtctggg

SEQ ID NO: 575 - DNA, 23 bp, Artificial Sequence
  Description of Artificial Sequence: Synthetic oligonucleotide
aaaagcagagtgtaaatgtctgg

SEQ ID NO: 576 - DNA, 23 bp, Artificial Sequence
  Description of Artificial Sequence: Synthetic oligonucleotide
tttacactctgctttttcacagg

SEQ ID NO: 577 - DNA, 23 bp, Artificial Sequence
  Description of Artificial Sequence: Synthetic oligonucleotide
ttacactctgctttttcacaggg

SEQ ID NO: 578 - DNA, 23 bp, Artificial Sequence
  Description of Artificial Sequence: Synthetic oligonucleotide
gctttttcacagggtccctgagg

SEQ ID NO: 579 - DNA, 23 bp, Artificial Sequence
  Description of Artificial Sequence: Synthetic oligonucleotide
ccagatccaaagaatcctcaggg

SEQ ID NO: 580 - DNA, 23 bp, Artificial Sequence
  Description of Artificial Sequence: Synthetic oligonucleotide
cccagatccaaagaatcctcagg

SEQ ID NO: 581 - DNA, 23 bp, Artificial Sequence
  Description of Artificial Sequence: Synthetic oligonucleotide
cagggtccctgaggattctttgg

SEQ ID NO: 582 - DNA, 23 bp, Artificial Sequence
  Description of Artificial Sequence: Synthetic oligonucleotide
ccctgaggattctttggatctgg

SEQ ID NO: 583 - DNA, 23 bp, Artificial Sequence
  Description of Artificial Sequence: Synthetic oligonucleotide
cctgaggattctttggatctggg

SEQ ID NO: 584 - DNA, 23 bp, Artificial Sequence
  Description of Artificial Sequence: Synthetic oligonucleotide
ttctttggatctgggtagtttgg

SEQ ID NO: 585 - DNA, 23 bp, Artificial Sequence
  Description of Artificial Sequence: Synthetic oligonucleotide
tctttggatctgggtagtttggg

SEQ ID NO: 586 - DNA, 23 bp, Artificial Sequence
  Description of Artificial Sequence: Synthetic oligonucleotide
ctttggatctgggtagtttgggg

SEQ ID NO: 587 - DNA, 23 bp, Artificial Sequence
  Description of Artificial Sequence: Synthetic oligonucleotide
gcatccaggcagggtgtagaagg

SEQ ID NO: 588 - DNA, 23 bp, Artificial Sequence
  Description of Artificial Sequence: Synthetic oligonucleotide
tgctccttctacaccctgcctgg

SEQ ID NO: 589 - DNA, 23 bp, Artificial Sequence
  Description of Artificial Sequence: Synthetic oligonucleotide
tggggcctagcatccaggcaggg

SEQ ID NO: 590 - DNA, 23 bp, Artificial Sequence
  Description of Artificial Sequence: Synthetic oligonucleotide
atggggcctagcatccaggcagg

SEQ ID NO: 591 - DNA, 23 bp, Artificial Sequence
  Description of Artificial Sequence: Synthetic oligonucleotide
ctagatggggcctagcatccagg

SEQ ID NO: 592 - DNA, 23 bp, Artificial Sequence
  Description of Artificial Sequence: Synthetic oligonucleotide
ctacaccctgcctggatgctagg

SEQ ID NO: 593 - DNA, 23 bp, Artificial Sequence
  Description of Artificial Sequence: Synthetic oligonucleotide
tgttgttcacattctagatgggg

SEQ ID NO: 594 - DNA, 23 bp, Artificial Sequence
  Description of Artificial Sequence: Synthetic oligonucleotide
ctgttgttcacattctagatggg

SEQ ID NO: 595 - DNA, 23 bp, Artificial Sequence
  Description of Artificial Sequence: Synthetic oligonucleotide
tctgttgttcacattctagatgg

SEQ ID NO: 596 - DNA, 23 bp, Artificial Sequence
  Description of Artificial Sequence: Synthetic oligonucleotide
agaatgtgaacaacagaacaagg

SEQ ID NO: 597 - DNA, 23 bp, Artificial Sequence
  Description of Artificial Sequence: Synthetic oligonucleotide
aggcagaacacttgtcctcaagg

SEQ ID NO: 598 - DNA, 23 bp, Artificial Sequence
  Description of Artificial Sequence: Synthetic oligonucleotide
taacactcaacagaaccttgagg

SEQ ID NO: 599 - DNA, 23 bp, Artificial Sequence
  Description of Artificial Sequence: Synthetic oligonucleotide
aagtgatgcggggaggtgggggg

SEQ ID NO: 600 - DNA, 23 bp, Artificial Sequence
  Description of Artificial Sequence: Synthetic oligonucleotide
taagtgatgcggggaggtggggg

SEQ ID NO: 601 - DNA, 23 bp, Artificial Sequence
  Description of Artificial Sequence: Synthetic oligonucleotide
gtaagtgatgcggggaggtgggg

SEQ ID NO: 602 - DNA, 23 bp, Artificial Sequence
  Description of Artificial Sequence: Synthetic oligonucleotide
tgtaagtgatgcggggaggtggg

SEQ ID NO: 603 - DNA, 23 bp, Artificial Sequence
  Description of Artificial Sequence: Synthetic oligonucleotide
ctgtaagtgatgcggggaggtgg

SEQ ID NO: 604 - DNA, 23 bp, Artificial Sequence
  Description of Artificial Sequence: Synthetic oligonucleotide
ttcctgtaagtgatgcggggagg

SEQ ID NO: 605 - DNA, 23 bp, Artificial Sequence
  Description of Artificial Sequence: Synthetic oligonucleotide
gaattcctgtaagtgatgcgggg

SEQ ID NO: 606 - DNA, 23 bp, Artificial Sequence
  Description of Artificial Sequence: Synthetic oligonucleotide
agaattcctgtaagtgatgcggg

SEQ ID NO: 607 - DNA, 23 bp, Artificial Sequence
  Description of Artificial Sequence: Synthetic oligonucleotide
cagaattcctgtaagtgatgcgg

SEQ ID NO: 608 - DNA, 23 bp, Artificial Sequence
  Description of Artificial Sequence: Synthetic oligonucleotide
cacctccccgcatcacttacagg

SEQ ID NO: 609 - DNA, 23 bp, Artificial Sequence
  Description of Artificial Sequence: Synthetic oligonucleotide
tcacttacaggaattctgtttgg

SEQ ID NO: 610 - DNA, 23 bp, Artificial Sequence
  Description of Artificial Sequence: Synthetic oligonucleotide
tacggtccttatttgatgttggg

SEQ ID NO: 611 - DNA, 23 bp, Artificial Sequence
  Description of Artificial Sequence: Synthetic oligonucleotide
atacggtccttatttgatgttgg

SEQ ID NO: 612 - DNA, 23 bp, Artificial Sequence
  Description of Artificial Sequence: Synthetic oligonucleotide
ttggaacccaacatcaaataagg

SEQ ID NO: 613 - DNA, 23 bp, Artificial Sequence
  Description of Artificial Sequence: Synthetic oligonucleotide
ccatcctctgacagtggatacgg

SEQ ID NO: 614 - DNA, 23 bp, Artificial Sequence
  Description of Artificial Sequence: Synthetic oligonucleotide
tgcttcccatcctctgacagtgg

SEQ ID NO: 615 - DNA, 23 bp, Artificial Sequence
  Description of Artificial Sequence: Synthetic oligonucleotide
aggaccgtatccactgtcagagg

SEQ ID NO: 616 - DNA, 23 bp, Artificial Sequence
  Description of Artificial Sequence: Synthetic oligonucleotide
ccgtatccactgtcagaggatgg

SEQ ID NO: 617 - DNA, 23 bp, Artificial Sequence
  Description of Artificial Sequence: Synthetic oligonucleotide
cgtatccactgtcagaggatggg

SEQ ID NO: 618 - DNA, 23 bp, Artificial Sequence
  Description of Artificial Sequence: Synthetic oligonucleotide
atgggaagcagcatgtcatctgg

SEQ ID NO: 619 - DNA, 23 bp, Artificial Sequence
  Description of Artificial Sequence: Synthetic oligonucleotide
tgggaagcagcatgtcatctggg

SEQ ID NO: 620 - DNA, 23 bp, Artificial Sequence
  Description of Artificial Sequence: Synthetic oligonucleotide
cagcatgtcatctgggacattgg

SEQ ID NO: 621 - DNA, 23 bp, Artificial Sequence
  Description of Artificial Sequence: Synthetic oligonucleotide
tcatctgggacattggagaaagg

SEQ ID NO: 622 - DNA, 23 bp, Artificial Sequence
  Description of Artificial Sequence: Synthetic oligonucleotide
ggacattggagaaaggctcctgg

SEQ ID NO: 623 - DNA, 23 bp, Artificial Sequence
  Description of Artificial Sequence: Synthetic oligonucleotide
gacattggagaaaggctcctggg

SEQ ID NO: 624 - DNA, 23 bp, Artificial Sequence
  Description of Artificial Sequence: Synthetic oligonucleotide
acattggagaaaggctcctgggg

SEQ ID NO: 625 - DNA, 23 bp, Artificial Sequence
  Description of Artificial Sequence: Synthetic oligonucleotide
cattggagaaaggctcctggggg

SEQ ID NO: 626 - DNA, 23 bp, Artificial Sequence
  Description of Artificial Sequence: Synthetic oligonucleotide
gctcaagtcccacttcccccagg

SEQ ID NO: 627 - DNA, 23 bp, Artificial Sequence
  Description of Artificial Sequence: Synthetic oligonucleotide
agaaaggctcctgggggaagtgg

SEQ ID NO: 628 - DNA, 23 bp, Artificial Sequence
  Description of Artificial Sequence: Synthetic oligonucleotide
gaaaggctcctgggggaagtggg

SEQ ID NO: 629 - DNA, 23 bp, Artificial Sequence
  Description of Artificial Sequence: Synthetic oligonucleotide
atgaacaactgagagttaaatgg

SEQ ID NO: 630 - DNA, 23 bp, Artificial Sequence
  Description of Artificial Sequence: Synthetic oligonucleotide
tgaacaactgagagttaaatggg

SEQ ID NO: 631 - DNA, 23 bp, Artificial Sequence
  Description of Artificial Sequence: Synthetic oligonucleotide
atgggagagcatcccctatcagg

SEQ ID NO: 632 - DNA, 23 bp, Artificial Sequence
  Description of Artificial Sequence: Synthetic oligonucleotide
tgggagagcatcccctatcaggg

SEQ ID NO: 633 - DNA, 23 bp, Artificial Sequence
  Description of Artificial Sequence: Synthetic oligonucleotide
tgctctcaggaccctgatagggg

SEQ ID NO: 634 - DNA, 23 bp, Artificial Sequence
  Description of Artificial Sequence: Synthetic oligonucleotide
ttgctctcaggaccctgataggg

SEQ ID NO: 635 - DNA, 23 bp, Artificial Sequence
  Description of Artificial Sequence: Synthetic oligonucleotide
gttgctctcaggaccctgatagg

SEQ ID NO: 636 - DNA, 23 bp, Artificial Sequence
  Description of Artificial Sequence: Synthetic oligonucleotide
aaccatggctggttgctctcagg

SEQ ID NO: 637 - DNA, 23 bp, Artificial Sequence
  Description of Artificial Sequence: Synthetic oligonucleotide
gtcctgagagcaaccagccatgg

SEQ ID NO: 638 - DNA, 23 bp, Artificial Sequence
  Description of Artificial Sequence: Synthetic oligonucleotide
tagctggtttaaaccatggctgg

SEQ ID NO: 639 - DNA, 23 bp, Artificial Sequence
  Description of Artificial Sequence: Synthetic oligonucleotide
tttatagctggtttaaaccatgg

SEQ ID NO: 640 - DNA, 23 bp, Artificial Sequence
  Description of Artificial Sequence: Synthetic oligonucleotide
taaacccgaggctttatagctgg

SEQ ID NO: 641 - DNA, 23 bp, Artificial Sequence
  Description of Artificial Sequence: Synthetic oligonucleotide
ttaaaccagctataaagcctcgg

SEQ ID NO: 642 - DNA, 23 bp, Artificial Sequence
  Description of Artificial Sequence: Synthetic oligonucleotide
taaaccagctataaagcctcggg

SEQ ID NO: 643 - DNA, 23 bp, Artificial Sequence
  Description of Artificial Sequence: Synthetic oligonucleotide
ctgtctatcctataaacccgagg

SEQ ID NO: 644 - DNA, 23 bp, Artificial Sequence
  Description of Artificial Sequence: Synthetic oligonucleotide
ctataaagcctcgggtttatagg

SEQ ID NO: 645 - DNA, 23 bp, Artificial Sequence
  Description of Artificial Sequence: Synthetic oligonucleotide
tataggatagacagtaacaatgg

SEQ ID NO: 646 - DNA, 23 bp, Artificial Sequence
  Description of Artificial Sequence: Synthetic oligonucleotide
cagtaacaatggcttgtctttgg

SEQ ID NO: 647 - DNA, 23 bp, Artificial Sequence
  Description of Artificial Sequence: Synthetic oligonucleotide
agtaacaatggcttgtctttggg

SEQ ID NO: 648 - DNA, 23 bp, Artificial Sequence
  Description of Artificial Sequence: Synthetic oligonucleotide
gtctttgggagccaagcagctgg

SEQ ID NO: 649 - DNA, 23 bp, Artificial Sequence
  Description of Artificial Sequence: Synthetic oligonucleotide
gcatgcctggaccagctgcttgg

SEQ ID NO: 650 - DNA, 23 bp, Artificial Sequence
  Description of Artificial Sequence: Synthetic oligonucleotide
gggagccaagcagctggtccagg

SEQ ID NO: 651 - DNA, 23 bp, Artificial Sequence
  Description of Artificial Sequence: Synthetic oligonucleotide
acagacatgctctgcatgcctgg

SEQ ID NO: 652 - DNA, 23 bp, Artificial Sequence
  Description of Artificial Sequence: Synthetic oligonucleotide
gcatgcagagcatgtctgtatgg

SEQ ID NO: 653 - DNA, 23 bp, Artificial Sequence
  Description of Artificial Sequence: Synthetic oligonucleotide
tgtaaacaaaagcatctctcagg

SEQ ID NO: 654 - DNA, 23 bp, Artificial Sequence
  Description of Artificial Sequence: Synthetic oligonucleotide
tacatatccttctttgacatggg

SEQ ID NO: 655 - DNA, 23 bp, Artificial Sequence
  Description of Artificial Sequence: Synthetic oligonucleotide
gtacatatccttctttgacatgg

SEQ ID NO: 656 - DNA, 23 bp, Artificial Sequence
  Description of Artificial Sequence: Synthetic oligonucleotide
tcaattgcccatgtcaaagaagg

SEQ ID NO: 657 - DNA, 23 bp, Artificial Sequence
  Description of Artificial Sequence: Synthetic oligonucleotide
gagattttaacaatttttgcagg

SEQ ID NO: 658 - DNA, 23 bp, Artificial Sequence
  Description of Artificial Sequence: Synthetic oligonucleotide
agattttaacaatttttgcaggg

SEQ ID NO: 659 - DNA, 23 bp, Artificial Sequence
  Description of Artificial Sequence: Synthetic oligonucleotide
gattttaacaatttttgcagggg

SEQ ID NO: 660 - DNA, 23 bp, Artificial Sequence
  Description of Artificial Sequence: Synthetic oligonucleotide
ttttgcaggggaagctttcatgg

SEQ ID NO: 661 - DNA, 23 bp, Artificial Sequence
  Description of Artificial Sequence: Synthetic oligonucleotide
tttgcaggggaagctttcatggg

SEQ ID NO: 662 - DNA, 23 bp, Artificial Sequence
  Description of Artificial Sequence: Synthetic oligonucleotide
ttgcaggggaagctttcatgggg

SEQ ID NO: 663 - DNA, 23 bp, Artificial Sequence
  Description of Artificial Sequence: Synthetic oligonucleotide
tgcaggggaagctttcatggggg

SEQ ID NO: 664 - DNA, 23 bp, Artificial Sequence
  Description of Artificial Sequence: Synthetic oligonucleotide
gaagctttcatgggggctgatgg

SEQ ID NO: 665 - DNA, 23 bp, Artificial Sequence
  Description of Artificial Sequence: Synthetic oligonucleotide
aagctttcatgggggctgatggg

SEQ ID NO: 666 - DNA, 23 bp, Artificial Sequence
  Description of Artificial Sequence: Synthetic oligonucleotide
atgggggctgatgggaatctagg

SEQ ID NO: 667 - DNA, 23 bp, Artificial Sequence
  Description of Artificial Sequence: Synthetic oligonucleotide
gatatcttgggtttagactttgg

SEQ ID NO: 668 - DNA, 23 bp, Artificial Sequence
  Description of Artificial Sequence: Synthetic oligonucleotide
cttggtactggggatatcttggg

SEQ ID NO: 669 - DNA, 23 bp, Artificial Sequence
  Description of Artificial Sequence: Synthetic oligonucleotide
tcttggtactggggatatcttgg

SEQ ID NO: 670 - DNA, 23 bp, Artificial Sequence
  Description of Artificial Sequence: Synthetic oligonucleotide
tcatttcagtcttggtactgggg

SEQ ID NO: 671 - DNA, 23 bp, Artificial Sequence
  Description of Artificial Sequence: Synthetic oligonucleotide
gtcatttcagtcttggtactggg

SEQ ID NO: 672 - DNA, 23 bp, Artificial Sequence
  Description of Artificial Sequence: Synthetic oligonucleotide
agtcatttcagtcttggtactgg

SEQ ID NO: 673 - DNA, 23 bp, Artificial Sequence
  Description of Artificial Sequence: Synthetic oligonucleotide
ggagagagtcatttcagtcttgg

SEQ ID NO: 674 - DNA, 23 bp, Artificial Sequence
  Description of Artificial Sequence: Synthetic oligonucleotide
ctggaactttctagagatagagg

SEQ ID NO: 675 - DNA, 23 bp, Artificial Sequence
  Description of Artificial Sequence: Synthetic oligonucleotide
tgtttgcctccttgggtcactgg

SEQ ID NO: 676 - DNA, 23 bp, Artificial Sequence
  Description of Artificial Sequence: Synthetic oligonucleotide
tagaaagttccagtgacccaagg

SEQ ID NO: 677 - DNA, 23 bp, Artificial Sequence
  Description of Artificial Sequence: Synthetic oligonucleotide
aaagttccagtgacccaaggagg

SEQ ID NO: 678 - DNA, 23 bp, Artificial Sequence
  Description of Artificial Sequence: Synthetic oligonucleotide
cccatcgtgtttgcctccttggg

SEQ ID NO: 679 - DNA, 23 bp, Artificial Sequence
  Description of Artificial Sequence: Synthetic oligonucleotide
tcccatcgtgtttgcctccttgg

SEQ ID NO: 680 - DNA, 23 bp, Artificial Sequence
  Description of Artificial Sequence: Synthetic oligonucleotide
acccaaggaggcaaacacgatgg

SEQ ID NO: 681 - DNA, 23 bp, Artificial Sequence
  Description of Artificial Sequence: Synthetic oligonucleotide
cccaaggaggcaaacacgatggg

SEQ ID NO: 682 - DNA, 23 bp, Artificial Sequence
  Description of Artificial Sequence: Synthetic oligonucleotide
cacgatgggagtcattaaagtgg

SEQ ID NO: 683 - DNA, 23 bp, Artificial Sequence
  Description of Artificial Sequence: Synthetic oligonucleotide
acgatgggagtcattaaagtggg

SEQ ID NO: 684 - DNA, 23 bp, Artificial Sequence
  Description of Artificial Sequence: Synthetic oligonucleotide
cgatgggagtcattaaagtgggg

SEQ ID NO: 685 - DNA, 23 bp, Artificial Sequence
  Description of Artificial Sequence: Synthetic oligonucleotide
tgggagtcattaaagtggggtgg

SEQ ID NO: 686 - DNA, 23 bp, Artificial Sequence
  Description of Artificial Sequence: Synthetic oligonucleotide
aaaacaaaagcagcagaattagg

SEQ ID NO: 687 - DNA, 23 bp, Artificial Sequence
  Description of Artificial Sequence: Synthetic oligonucleotide
gtgagtatctgtaaccagccagg

SEQ ID NO: 688 - DNA, 23 bp, Artificial Sequence
  Description of Artificial Sequence: Synthetic oligonucleotide
atacagcttggtctcctggctgg

SEQ ID NO: 689 - DNA, 23 bp, Artificial Sequence
  Description of Artificial Sequence: Synthetic oligonucleotide
gtgcatacagcttggtctcctgg

SEQ ID NO: 690 - DNA, 23 bp, Artificial Sequence
  Description of Artificial Sequence: Synthetic oligonucleotide
cagccagcgtgcatacagcttgg

SEQ ID NO: 691 - DNA, 23 bp, Artificial Sequence
  Description of Artificial Sequence: Synthetic oligonucleotide
agaccaagctgtatgcacgctgg

SEQ ID NO: 692 - DNA, 23 bp, Artificial Sequence
  Description of Artificial Sequence: Synthetic oligonucleotide
cacgctggctgcagttccccagg

SEQ ID NO: 693 - DNA, 23 bp, Artificial Sequence
  Description of Artificial Sequence: Synthetic oligonucleotide
acgctggctgcagttccccaggg

SEQ ID NO: 694 - DNA, 23 bp, Artificial Sequence
  Description of Artificial Sequence: Synthetic oligonucleotide
gaaggctggcccaggccctgggg

SEQ ID NO: 695 - DNA, 23 bp, Artificial Sequence
  Description of Artificial Sequence: Synthetic oligonucleotide
ggctgcagttccccagggcctgg

SEQ ID NO: 696 - DNA, 23 bp, Artificial Sequence
  Description of Artificial Sequence: Synthetic oligonucleotide
agaaggctggcccaggccctggg

SEQ ID NO: 697 - DNA, 23 bp, Artificial Sequence
  Description of Artificial Sequence: Synthetic oligonucleotide
gctgcagttccccagggcctggg

SEQ ID NO: 698 - DNA, 23 bp, Artificial Sequence
  Description of Artificial Sequence: Synthetic oligonucleotide
tagaaggctggcccaggccctgg

SEQ ID NO: 699 - DNA, 23 bp, Artificial Sequence
  Description of Artificial Sequence: Synthetic oligonucleotide
accttctagaaggctggcccagg

SEQ ID NO: 700 - DNA, 23 bp, Artificial Sequence
  Description of Artificial Sequence: Synthetic oligonucleotide
aacctgaccttctagaaggctgg

SEQ ID NO: 701 - DNA, 23 bp, Artificial Sequence
  Description of Artificial Sequence: Synthetic oligonucleotide
gcctgggccagccttctagaagg

SEQ ID NO: 702 - DNA, 23 bp, Artificial Sequence
  Description of Artificial Sequence: Synthetic oligonucleotide
aggcaacctgaccttctagaagg

SEQ ID NO: 703 - DNA, 23 bp, Artificial Sequence
  Description of Artificial Sequence: Synthetic oligonucleotide
ggccagccttctagaaggtcagg

SEQ ID NO: 704 - DNA, 23 bp, Artificial Sequence
  Description of Artificial Sequence: Synthetic oligonucleotide
atgcatcttcatggctttttagg

SEQ ID NO: 705 - DNA, 23 bp, Artificial Sequence
  Description of Artificial Sequence: Synthetic oligonucleotide
tgttcgcacatgcatcttcatgg

SEQ ID NO: 706 - DNA, 23 bp, Artificial Sequence
  Description of Artificial Sequence: Synthetic oligonucleotide
gatgcatgtgcgaacatgtctgg

SEQ ID NO: 707 - DNA, 23 bp, Artificial Sequence
  Description of Artificial Sequence: Synthetic oligonucleotide
atgcatgtgcgaacatgtctggg

SEQ ID NO: 708 - DNA, 23 bp, Artificial Sequence
  Description of Artificial Sequence: Synthetic oligonucleotide
aatgccactccctagcacgcagg

SEQ ID NO: 709 - DNA, 23 bp, Artificial Sequence
  Description of Artificial Sequence: Synthetic oligonucleotide
atgtctgggacctgcgtgctagg

SEQ ID NO: 710 - DNA, 23 bp, Artificial Sequence
  Description of Artificial Sequence: Synthetic oligonucleotide
tgtctgggacctgcgtgctaggg

SEQ ID NO: 711 - DNA, 23 bp, Artificial Sequence
  Description of Artificial Sequence: Synthetic oligonucleotide
gggacctgcgtgctagggagtgg

SEQ ID NO: 712 - DNA, 23 bp, Artificial Sequence
  Description of Artificial Sequence: Synthetic oligonucleotide
tgctagggagtggcatttttagg

SEQ ID NO: 713 - DNA, 23 bp, Artificial Sequence
  Description of Artificial Sequence: Synthetic oligonucleotide
gagtggcatttttaggaagctgg

SEQ ID NO: 714 - DNA, 23 bp, Artificial Sequence
  Description of Artificial Sequence: Synthetic oligonucleotide
ttaaaaatgcaaaacaaaattgg

SEQ ID NO: 715 - DNA, 23 bp, Artificial Sequence
  Description of Artificial Sequence: Synthetic oligonucleotide
aattttgttttgcatttttaagg

SEQ ID NO: 716 - DNA, 23 bp, Artificial Sequence
  Description of Artificial Sequence: Synthetic oligonucleotide
ttaaggctgctgacaagacttgg

SEQ ID NO: 717 - DNA, 23 bp, Artificial Sequence
  Description of Artificial Sequence: Synthetic oligonucleotide
aagacttggagacatttttcagg

SEQ ID NO: 718 - DNA, 23 bp, Artificial Sequence
  Description of Artificial Sequence: Synthetic oligonucleotide
agacttggagacatttttcaggg

SEQ ID NO: 719 - DNA, 23 bp, Artificial Sequence
  Description of Artificial Sequence: Synthetic oligonucleotide
ttggagacatttttcagggctgg

SEQ ID NO: 720 - DNA, 23 bp, Artificial Sequence
  Description of Artificial Sequence: Synthetic oligonucleotide
gacatttttcagggctggtttgg

SEQ ID NO: 721 - DNA, 23 bp, Artificial Sequence
  Description of Artificial Sequence: Synthetic oligonucleotide
acatttttcagggctggtttggg

SEQ ID NO: 722 - DNA, 23 bp, Artificial Sequence
  Description of Artificial Sequence: Synthetic oligonucleotide
catatctgtattattttatgagg

SEQ ID NO: 723 - DNA, 23 bp, Artificial Sequence
  Description of Artificial Sequence: Synthetic oligonucleotide
aaaataatacagatatgcagtgg

SEQ ID NO: 724 - DNA, 23 bp, Artificial Sequence
  Description of Artificial Sequence: Synthetic oligonucleotide
tttccagagtcacatgctggtgg

SEQ ID NO: 725 - DNA, 23 bp, Artificial Sequence
  Description of Artificial Sequence: Synthetic oligonucleotide
tcttttccagagtcacatgctgg

SEQ ID NO: 726 - DNA, 23 bp, Artificial Sequence
  Description of Artificial Sequence: Synthetic oligonucleotide
aagccaccagcatgtgactctgg

SEQ ID NO: 727 - DNA, 23 bp, Artificial Sequence
  Description of Artificial Sequence: Synthetic oligonucleotide
ctctggaaaagaaagcccattgg

SEQ ID NO: 728 - DNA, 23 bp, Artificial Sequence
  Description of Artificial Sequence: Synthetic oligonucleotide
tttagtacagattcaccaatggg

SEQ ID NO: 729 - DNA, 23 bp, Artificial Sequence
  Description of Artificial Sequence: Synthetic oligonucleotide
ctttagtacagattcaccaatgg

SEQ ID NO: 730 - DNA, 23 bp, Artificial Sequence
  Description of Artificial Sequence: Synthetic oligonucleotide
ttaggactgtaagatagggatgg

SEQ ID NO: 731 - DNA, 23 bp, Artificial Sequence
  Description of Artificial Sequence: Synthetic oligonucleotide
taccttaggactgtaagataggg

SEQ ID NO: 732 - DNA, 23 bp, Artificial Sequence
  Description of Artificial Sequence: Synthetic oligonucleotide
ttaccttaggactgtaagatagg

SEQ ID NO: 733 - DNA, 23 bp, Artificial Sequence
  Description of Artificial Sequence: Synthetic oligonucleotide
atccctatcttacagtcctaagg

SEQ ID NO: 734 - DNA, 23 bp, Artificial Sequence
  Description of Artificial Sequence: Synthetic oligonucleotide
ctttttggggtgtttaccttagg

SEQ ID NO: 735 - DNA, 23 bp, Artificial Sequence
  Description of Artificial Sequence: Synthetic oligonucleotide
tagtgctctaagtctttttgggg

SEQ ID NO: 736 - DNA, 23 bp, Artificial Sequence
  Description of Artificial Sequence: Synthetic oligonucleotide
ttagtgctctaagtctttttggg

SEQ ID NO: 737 - DNA, 23 bp, Artificial Sequence
  Description of Artificial Sequence: Synthetic oligonucleotide
tttagtgctctaagtctttttgg

SEQ ID NO: 738 - DNA, 23 bp, Artificial Sequence
  Description of Artificial Sequence: Synthetic oligonucleotide
gtagagctagggtttgaatgagg

SEQ ID NO: 739 - DNA, 23 bp, Artificial Sequence
  Description of Artificial Sequence: Synthetic oligonucleotide
gactggcccaggtagagctaggg

SEQ ID NO: 740 - DNA, 23 bp, Artificial Sequence
  Description of Artificial Sequence: Synthetic oligonucleotide
cgactggcccaggtagagctagg

SEQ ID NO: 741 - DNA, 23 bp, Artificial Sequence
  Description of Artificial Sequence: Synthetic oligonucleotide
attcaaaccctagctctacctgg

SEQ ID NO: 742 - DNA, 23 bp, Artificial Sequence
  Description of Artificial Sequence: Synthetic oligonucleotide
ttcaaaccctagctctacctggg

SEQ ID NO: 743 - DNA, 23 bp, Artificial Sequence
  Description of Artificial Sequence: Synthetic oligonucleotide
aaagatgaatcgactggcccagg

SEQ ID NO: 744 - DNA, 23 bp, Artificial Sequence
  Description of Artificial Sequence: Synthetic oligonucleotide
ggttctaaagatgaatcgactgg

SEQ ID NO: 745 - DNA, 23 bp, Artificial Sequence
  Description of Artificial Sequence: Synthetic oligonucleotide
ttttcaggtaaagcaatggaggg

SEQ ID NO: 746 - DNA, 23 bp, Artificial Sequence
  Description of Artificial Sequence: Synthetic oligonucleotide
cttttcaggtaaagcaatggagg

SEQ ID NO: 747 - DNA, 23 bp, Artificial Sequence
  Description of Artificial Sequence: Synthetic oligonucleotide
gaacttttcaggtaaagcaatgg

SEQ ID NO: 748 - DNA, 23 bp, Artificial Sequence
  Description of Artificial Sequence: Synthetic oligonucleotide
ttttgttatacgaacttttcagg

SEQ ID NO: 749 - DNA, 23 bp, Artificial Sequence
  Description of Artificial Sequence: Synthetic oligonucleotide
tgaaaagttcgtataacaaaagg

SEQ ID NO: 750 - DNA, 23 bp, Artificial Sequence
  Description of Artificial Sequence: Synthetic oligonucleotide
taacaaaaggacccaccttatgg

SEQ ID NO: 751 - DNA, 23 bp, Artificial Sequence
  Description of Artificial Sequence: Synthetic oligonucleotide
ttgtaacaaccccataaggtggg

SEQ ID NO: 752 - DNA, 23 bp, Artificial Sequence
  Description of Artificial Sequence: Synthetic oligonucleotide
aacaaaaggacccaccttatggg

SEQ ID NO: 753 - DNA, 23 bp, Artificial Sequence
  Description of Artificial Sequence: Synthetic oligonucleotide
cttgtaacaaccccataaggtgg

SEQ ID NO: 754 - DNA, 23 bp, Artificial Sequence
  Description of Artificial Sequence: Synthetic oligonucleotide
acaaaaggacccaccttatgggg

SEQ ID NO: 755 - DNA, 23 bp, Artificial Sequence
  Description of Artificial Sequence: Synthetic oligonucleotide
atccttgtaacaaccccataagg

SEQ ID NO: 756 - DNA, 23 bp, Artificial Sequence
  Description of Artificial Sequence: Synthetic oligonucleotide
caccttatggggttgttacaagg

SEQ ID NO: 757 - DNA, 23 bp, Artificial Sequence
  Description of Artificial Sequence: Synthetic oligonucleotide
tgtacataagagactgaatatgg

SEQ ID NO: 758 - DNA, 23 bp, Artificial Sequence
  Description of Artificial Sequence: Synthetic oligonucleotide
attgagcactgatatatgctggg

SEQ ID NO: 759 - DNA, 23 bp, Artificial Sequence
  Description of Artificial Sequence: Synthetic oligonucleotide
tattgagcactgatatatgctgg

SEQ ID NO: 760 - DNA, 23 bp, Artificial Sequence
  Description of Artificial Sequence: Synthetic oligonucleotide
ggtctagatttgcaaatctaggg

SEQ ID NO: 761 - DNA, 23 bp, Artificial Sequence
  Description of Artificial Sequence: Synthetic oligonucleotide
tggtctagatttgcaaatctagg

SEQ ID NO: 762 - DNA, 23 bp, Artificial Sequence
  Description of Artificial Sequence: Synthetic oligonucleotide
cactcttacttctgcttgtgtgg

SEQ ID NO: 763 - DNA, 23 bp, Artificial Sequence
  Description of Artificial Sequence: Synthetic oligonucleotide
agcagaagtaagagtgccaacgg

SEQ ID NO: 764 - DNA, 23 bp, Artificial Sequence
  Description of Artificial Sequence: Synthetic oligonucleotide
gcagaagtaagagtgccaacggg

SEQ ID NO: 765 - DNA, 23 bp, Artificial Sequence
  Description of Artificial Sequence: Synthetic oligonucleotide
cagaagtaagagtgccaacgggg

SEQ ID NO: 766 - DNA, 23 bp, Artificial Sequence
  Description of Artificial Sequence: Synthetic oligonucleotide
cacactggtccacaccccgttgg

SEQ ID NO: 767 - DNA, 23 bp, Artificial Sequence
  Description of Artificial Sequence: Synthetic oligonucleotide
gtaagagtgccaacggggtgtgg

SEQ ID NO: 768 - DNA, 23 bp, Artificial Sequence
  Description of Artificial Sequence: Synthetic oligonucleotide
caacggggtgtggaccagtgtgg

SEQ ID NO: 769 - DNA, 23 bp, Artificial Sequence
  Description of Artificial Sequence: Synthetic oligonucleotide
aagccctattgtaaccacactgg

SEQ ID NO: 770 - DNA, 23 bp, Artificial Sequence
  Description of Artificial Sequence: Synthetic oligonucleotide
tggaccagtgtggttacaatagg

SEQ ID NO: 771 - DNA, 23 bp, Artificial Sequence
  Description of Artificial Sequence: Synthetic oligonucleotide
ggaccagtgtggttacaataggg

SEQ ID NO: 772 - DNA, 23 bp, Artificial Sequence
  Description of Artificial Sequence: Synthetic oligonucleotide
tgttgatgtctgtttcagcaagg

SEQ ID NO: 773 - DNA, 23 bp, Artificial Sequence
  Description of Artificial Sequence: Synthetic oligonucleotide
tgatgtctgtttcagcaaggagg

SEQ ID NO: 774 - DNA, 23 bp, Artificial Sequence
  Description of Artificial Sequence: Synthetic oligonucleotide
gatgtctgtttcagcaaggaggg

SEQ ID NO: 775 - DNA, 23 bp, Artificial Sequence
  Description of Artificial Sequence: Synthetic oligonucleotide
gtctgtttcagcaaggagggagg

SEQ ID NO: 776 - DNA, 23 bp, Artificial Sequence
  Description of Artificial Sequence: Synthetic oligonucleotide
caccagggagctgggcagtgggg

SEQ ID NO: 777 - DNA, 23 bp, Artificial Sequence
  Description of Artificial Sequence: Synthetic oligonucleotide
ccaccagggagctgggcagtggg

SEQ ID NO: 778 - DNA, 23 bp, Artificial Sequence
  Description of Artificial Sequence: Synthetic oligonucleotide
tccaccagggagctgggcagtgg

SEQ ID NO: 779 - DNA, 23 bp, Artificial Sequence
  Description of Artificial Sequence: Synthetic oligonucleotide
cctgattccaccagggagctggg

SEQ ID NO: 780 - DNA, 23 bp, Artificial Sequence
  Description of Artificial Sequence: Synthetic oligonucleotide
taccccactgcccagctccctgg

SEQ ID NO: 781 - DNA, 23 bp, Artificial Sequence
  Description of Artificial Sequence: Synthetic oligonucleotide
acctgattccaccagggagctgg

SEQ ID NO: 782 - DNA, 23 bp, Artificial Sequence
  Description of Artificial Sequence: Synthetic oligonucleotide
cccactgcccagctccctggtgg

SEQ ID NO: 783 - DNA, 23 bp, Artificial Sequence
  Description of Artificial Sequence: Synthetic oligonucleotide
acatgcacctgattccaccaggg

SEQ ID NO: 784 - DNA, 23 bp, Artificial Sequence
  Description of Artificial Sequence: Synthetic oligonucleotide
aacatgcacctgattccaccagg

SEQ ID NO: 785 - DNA, 23 bp, Artificial Sequence
  Description of Artificial Sequence: Synthetic oligonucleotide
cccagctccctggtggaatcagg

SEQ ID NO: 786 - DNA, 23 bp, Artificial Sequence
  Description of Artificial Sequence: Synthetic oligonucleotide
ggtgcatgttctaacaattctgg

SEQ ID NO: 787 - DNA, 23 bp, Artificial Sequence
  Description of Artificial Sequence: Synthetic oligonucleotide
gtgcatgttctaacaattctggg

SEQ ID NO: 788 - DNA, 23 bp, Artificial Sequence
  Description of Artificial Sequence: Synthetic oligonucleotide
tgcatgttctaacaattctgggg

SEQ ID NO: 789 - DNA, 23 bp, Artificial Sequence
  Description of Artificial Sequence: Synthetic oligonucleotide
tgacagtgccaaaacagattagg

SEQ ID NO: 790 - DNA, 23 bp, Artificial Sequence
  Description of Artificial Sequence: Synthetic oligonucleotide
tggggaaacctaatctgttttgg

SEQ ID NO: 791 - DNA, 23 bp, Artificial Sequence
  Description of Artificial Sequence: Synthetic oligonucleotide
ctgtcaacagatctcaaagctgg

SEQ ID NO: 792 - DNA, 23 bp, Artificial Sequence
  Description of Artificial Sequence: Synthetic oligonucleotide
gctggctgtctcctatagctagg

SEQ ID NO: 793 - DNA, 23 bp, Artificial Sequence
  Description of Artificial Sequence: Synthetic oligonucleotide
atacacatcttcctagctatagg

SEQ ID NO: 794 - DNA, 23 bp, Artificial Sequence
  Description of Artificial Sequence: Synthetic oligonucleotide
caggccttcacaagtggctcagg

SEQ ID NO: 795 - DNA, 23 bp, Artificial Sequence
  Description of Artificial Sequence: Synthetic oligonucleotide
gaaggtcaggccttcacaagtgg

SEQ ID NO: 796 - DNA, 23 bp, Artificial Sequence
  Description of Artificial Sequence: Synthetic oligonucleotide
atctcctgagccacttgtgaagg

SEQ ID NO: 797 - DNA, 23 bp, Artificial Sequence
  Description of Artificial Sequence: Synthetic oligonucleotide
atggagacaggaggaaggtcagg

SEQ ID NO: 798 - DNA, 23 bp, Artificial Sequence
  Description of Artificial Sequence: Synthetic oligonucleotide
tatgtatggagacaggaggaagg

SEQ ID NO: 799 - DNA, 23 bp, Artificial Sequence
  Description of Artificial Sequence: Synthetic oligonucleotide
ccattatgtatggagacaggagg

SEQ ID NO: 800 - DNA, 23 bp, Artificial Sequence
  Description of Artificial Sequence: Synthetic oligonucleotide
atcccattatgtatggagacagg

SEQ ID NO: 801 - DNA, 23 bp, Artificial Sequence
  Description of Artificial Sequence: Synthetic oligonucleotide
cttaatcatcccattatgtatgg

SEQ ID NO: 802 - DNA, 23 bp, Artificial Sequence
  Description of Artificial Sequence: Synthetic oligonucleotide
cctcctgtctccatacataatgg

SEQ ID NO: 803 - DNA, 23 bp, Artificial Sequence
  Description of Artificial Sequence: Synthetic oligonucleotide
ctcctgtctccatacataatggg

SEQ ID NO: 804 - DNA, 23 bp, Artificial Sequence
  Description of Artificial Sequence: Synthetic oligonucleotide
ttgaaaagtgcttaagagagtgg

SEQ ID NO: 805 - DNA, 23 bp, Artificial Sequence
  Description of Artificial Sequence: Synthetic oligonucleotide
cttaagcacttttcaatgttagg

SEQ ID NO: 806 - DNA, 23 bp, Artificial Sequence
  Description of Artificial Sequence: Synthetic oligonucleotide
ttaagcacttttcaatgttaggg

SEQ ID NO: 807 - DNA, 23 bp, Artificial Sequence
  Description of Artificial Sequence: Synthetic oligonucleotide
tcagttggctattaaattggagg

SEQ ID NO: 808 - DNA, 23 bp, Artificial Sequence
  Description of Artificial Sequence: Synthetic oligonucleotide
ctttcagttggctattaaattgg

SEQ ID NO: 809 - DNA, 23 bp, Artificial Sequence
  Description of Artificial Sequence: Synthetic oligonucleotide
gcattttctcttctttcagttgg

SEQ ID NO: 810 - DNA, 23 bp, Artificial Sequence
  Description of Artificial Sequence: Synthetic oligonucleotide
ttatttccacatacagtttaagg

SEQ ID NO: 811 - DNA, 23 bp, Artificial Sequence
  Description of Artificial Sequence: Synthetic oligonucleotide
ctctttccttaaactgtatgtgg

SEQ ID NO: 812 - DNA, 23 bp, Artificial Sequence
  Description of Artificial Sequence: Synthetic oligonucleotide
acataatcagggtcacacattgg

SEQ ID NO: 813 - DNA, 23 bp, Artificial Sequence
  Description of Artificial Sequence: Synthetic oligonucleotide
ctaattgcctaacataatcaggg

SEQ ID NO: 814 - DNA, 23 bp, Artificial Sequence
  Description of Artificial Sequence: Synthetic oligonucleotide
gctaattgcctaacataatcagg

SEQ ID NO: 815 - DNA, 23 bp, Artificial Sequence
  Description of Artificial Sequence: Synthetic oligonucleotide
tgtgtgaccctgattatgttagg

SEQ ID NO: 816 - DNA, 23 bp, Artificial Sequence
  Description of Artificial Sequence: Synthetic oligonucleotide
aacttccctcaattcatattagg

SEQ ID NO: 817 - DNA, 23 bp, Artificial Sequence
  Description of Artificial Sequence: Synthetic oligonucleotide
agcaatcctaatatgaattgagg

SEQ ID NO: 818 - DNA, 23 bp, Artificial Sequence
  Description of Artificial Sequence: Synthetic oligonucleotide
gcaatcctaatatgaattgaggg

SEQ ID NO: 819 - DNA, 23 bp, Artificial Sequence
  Description of Artificial Sequence: Synthetic oligonucleotide
taatatgaattgagggaagttgg

SEQ ID NO: 820 - DNA, 23 bp, Artificial Sequence
  Description of Artificial Sequence: Synthetic oligonucleotide
aatatgaattgagggaagttggg

SEQ ID NO: 821 - DNA, 23 bp, Artificial Sequence
  Description of Artificial Sequence: Synthetic oligonucleotide
ttgagggaagttgggattcatgg

SEQ ID NO: 822 - DNA, 23 bp, Artificial Sequence
  Description of Artificial Sequence: Synthetic oligonucleotide
gttgggattcatggcacagctgg

SEQ ID NO: 823 - DNA, 23 bp, Artificial Sequence
  Description of Artificial Sequence: Synthetic oligonucleotide
ttgggattcatggcacagctggg

SEQ ID NO: 824 - DNA, 23 bp, Artificial Sequence
  Description of Artificial Sequence: Synthetic oligonucleotide
tgggattcatggcacagctgggg

SEQ ID NO: 825 - DNA, 23 bp, Artificial Sequence
  Description of Artificial Sequence: Synthetic oligonucleotide
gacaggctcccagggactgctgg

SEQ ID NO: 826 - DNA, 23 bp, Artificial Sequence
  Description of Artificial Sequence: Synthetic oligonucleotide
ggggagataccagcagtccctgg

SEQ ID NO: 827 - DNA, 23 bp, Artificial Sequence
  Description of Artificial Sequence: Synthetic oligonucleotide
gggagataccagcagtccctggg

SEQ ID NO: 828 - DNA, 23 bp, Artificial Sequence
  Description of Artificial Sequence: Synthetic oligonucleotide
ctgccctggacaggctcccaggg

SEQ ID NO: 829 - DNA, 23 bp, Artificial Sequence
  Description of Artificial Sequence: Synthetic oligonucleotide
cctgccctggacaggctcccagg

SEQ ID NO: 830 - DNA, 23 bp, Artificial Sequence
  Description of Artificial Sequence: Synthetic oligonucleotide
cagtccctgggagcctgtccagg

SEQ ID NO: 831 - DNA, 23 bp, Artificial Sequence
  Description of Artificial Sequence: Synthetic oligonucleotide
agtccctgggagcctgtccaggg

SEQ ID NO: 832 - DNA, 23 bp, Artificial Sequence
  Description of Artificial Sequence: Synthetic oligonucleotide
gccatggacctgccctggacagg

SEQ ID NO: 833 - DNA, 23 bp, Artificial Sequence
  Description of Artificial Sequence: Synthetic oligonucleotide
cctgggagcctgtccagggcagg

SEQ ID NO: 834 - DNA, 23 bp, Artificial Sequence
  Description of Artificial Sequence: Synthetic oligonucleotide
aagctgccatggacctgccctgg

SEQ ID NO: 835 - DNA, 23 bp, Artificial Sequence
  Description of Artificial Sequence: Synthetic oligonucleotide
gcctgtccagggcaggtccatgg

SEQ ID NO: 836 - DNA, 23 bp, Artificial Sequence
  Description of Artificial Sequence: Synthetic oligonucleotide
aggcatggagcaagctgccatgg

SEQ ID NO: 837 - DNA, 23 bp, Artificial Sequence
  Description of Artificial Sequence: Synthetic oligonucleotide
gctgggctgtcaatcaggcatgg

SEQ ID NO: 838 - DNA, 23 bp, Artificial Sequence
  Description of Artificial Sequence: Synthetic oligonucleotide
tgcaggctgggctgtcaatcagg

SEQ ID NO: 839 - DNA, 23 bp, Artificial Sequence
  Description of Artificial Sequence: Synthetic oligonucleotide
caacttttagcttgcaggctggg

SEQ ID NO: 840 - DNA, 23 bp, Artificial Sequence
  Description of Artificial Sequence: Synthetic oligonucleotide
tcaacttttagcttgcaggctgg

SEQ ID NO: 841 - DNA, 23 bp, Artificial Sequence
  Description of Artificial Sequence: Synthetic oligonucleotide
tcactcaacttttagcttgcagg

SEQ ID NO: 842 - DNA, 23 bp, Artificial Sequence
  Description of Artificial Sequence: Synthetic oligonucleotide
agctaaaagttgagtgagctagg

SEQ ID NO: 843 - DNA, 23 bp, Artificial Sequence
  Description of Artificial Sequence: Synthetic oligonucleotide
taaaagttgagtgagctaggagg

SEQ ID NO: 844 - DNA, 23 bp, Artificial Sequence
  Description of Artificial Sequence: Synthetic oligonucleotide
ggtgtctgttagctgaatcttgg

SEQ ID NO: 845 - DNA, 23 bp, Artificial Sequence
  Description of Artificial Sequence: Synthetic oligonucleotide
atagcagcaagaatatcgctggg

SEQ ID NO: 846 - DNA, 23 bp, Artificial Sequence
  Description of Artificial Sequence: Synthetic oligonucleotide
catagcagcaagaatatcgctgg

SEQ ID NO: 847 - DNA, 23 bp, Artificial Sequence
  Description of Artificial Sequence: Synthetic oligonucleotide
ttcttgctgctatgaacaaaagg

SEQ ID NO: 848 - DNA, 23 bp, Artificial Sequence
  Description of Artificial Sequence: Synthetic oligonucleotide
aggcatcctggaagaatgggtgg

SEQ ID NO: 849 - DNA, 23 bp, Artificial Sequence
  Description of Artificial Sequence: Synthetic oligonucleotide
gtcaggcatcctggaagaatggg

SEQ ID NO: 850 - DNA, 23 bp, Artificial Sequence
  Description of Artificial Sequence: Synthetic oligonucleotide
agtcaggcatcctggaagaatgg

SEQ ID NO: 851 - DNA, 23 bp, Artificial Sequence
  Description of Artificial Sequence: Synthetic oligonucleotide
tatacaccacccattcttccagg

SEQ ID NO: 852 - DNA, 23 bp, Artificial Sequence
  Description of Artificial Sequence: Synthetic oligonucleotide
attttttaagtcaggcatcctgg

SEQ ID NO: 853 - DNA, 23 bp, Artificial Sequence
  Description of Artificial Sequence: Synthetic oligonucleotide
tttttcttattttttaagtcagg

SEQ ID NO: 854 - DNA, 23 bp, Artificial Sequence
  Description of Artificial Sequence: Synthetic oligonucleotide
ttaaaaaataagaaaaaagatgg

SEQ ID NO: 855 - DNA, 23 bp, Artificial Sequence
  Description of Artificial Sequence: Synthetic oligonucleotide
taaaaaataagaaaaaagatggg

SEQ ID NO: 856 - DNA, 23 bp, Artificial Sequence
  Description of Artificial Sequence: Synthetic oligonucleotide
aaataagaaaaaagatgggccgg

SEQ ID NO: 857 - DNA, 23 bp, Artificial Sequence
  Description of Artificial Sequence: Synthetic oligonucleotide
aataagaaaaaagatgggccggg

SEQ ID NO: 858 - DNA, 23 bp, Artificial Sequence
  Description of Artificial Sequence: Synthetic oligonucleotide
caggcgtgagccactgtgcccgg

SEQ ID NO: 859 - DNA, 23 bp, Artificial Sequence
  Description of Artificial Sequence: Synthetic oligonucleotide
aaaagatgggccgggcacagtgg

SEQ ID NO: 860 - DNA, 23 bp, Artificial Sequence
  Description of Artificial Sequence: Synthetic oligonucleotide
tcccaaagtgttgggattacagg

SEQ ID NO: 861 - DNA, 23 bp, Artificial Sequence
  Description of Artificial Sequence: Synthetic oligonucleotide
cctcggcctcccaaagtgttggg

SEQ ID NO: 862 - DNA, 23 bp, Artificial Sequence
  Description of Artificial Sequence: Synthetic oligonucleotide
cgcctgtaatcccaacactttgg

SEQ ID NO: 863 - DNA, 23 bp, Artificial Sequence
  Description of Artificial Sequence: Synthetic oligonucleotide
acctcggcctcccaaagtgttgg

SEQ ID NO: 864 - DNA, 23 bp, Artificial Sequence
  Description of Artificial Sequence: Synthetic oligonucleotide
gcctgtaatcccaacactttggg

SEQ ID NO: 865 - DNA, 23 bp, Artificial Sequence
  Description of Artificial Sequence: Synthetic oligonucleotide
tgtaatcccaacactttgggagg

SEQ ID NO: 866 - DNA, 23 bp, Artificial Sequence
  Description of Artificial Sequence: Synthetic oligonucleotide
cccaacactttgggaggccgagg

SEQ ID NO: 867 - DNA, 23 bp, Artificial Sequence
  Description of Artificial Sequence: Synthetic oligonucleotide
aacactttgggaggccgaggtgg

SEQ ID NO: 868 - DNA, 23 bp, Artificial Sequence
  Description of Artificial Sequence: Synthetic oligonucleotide
acactttgggaggccgaggtggg

SEQ ID NO: 869 - DNA, 23 bp, Artificial Sequence
  Description of Artificial Sequence: Synthetic oligonucleotide
accttgtgatccgcccacctcgg

SEQ ID NO: 870 - DNA, 23 bp, Artificial Sequence
  Description of Artificial Sequence: Synthetic oligonucleotide
ctttgggaggccgaggtgggcgg

SEQ ID NO: 871 - DNA, 23 bp, Artificial Sequence
  Description of Artificial Sequence: Synthetic oligonucleotide
gccgaggtgggcggatcacaagg

SEQ ID NO: 872 - DNA, 23 bp, Artificial Sequence
  Description of Artificial Sequence: Synthetic oligonucleotide
ggtgggcggatcacaaggtcagg

SEQ ID NO: 873 - DNA, 23 bp, Artificial Sequence
  Description of Artificial Sequence: Synthetic oligonucleotide
tcaggagacagagaccatcctgg

SEQ ID NO: 874 - DNA, 23 bp, Artificial Sequence
  Description of Artificial Sequence: Synthetic oligonucleotide
tttcaccatgttagccaggatgg

SEQ ID NO: 875 - DNA, 23 bp, Artificial Sequence
  Description of Artificial Sequence: Synthetic oligonucleotide
ggggtttcaccatgttagccagg

SEQ ID NO: 876 - DNA, 23 bp, Artificial Sequence
  Description of Artificial Sequence: Synthetic oligonucleotide
agagaccatcctggctaacatgg

SEQ ID NO: 877 - DNA, 23 bp, Artificial Sequence
  Description of Artificial Sequence: Synthetic oligonucleotide
gtatttttttagtagagacgggg

SEQ ID NO: 878 - DNA, 23 bp, Artificial Sequence
  Description of Artificial Sequence: Synthetic oligonucleotide
tgtatttttttagtagagacggg

SEQ ID NO: 879 - DNA, 23 bp, Artificial Sequence
  Description of Artificial Sequence: Synthetic oligonucleotide
ttgtatttttttagtagagacgg

SEQ ID NO: 880 - DNA, 23 bp, Artificial Sequence
  Description of Artificial Sequence: Synthetic oligonucleotide
aaaaaatacaaaaatattagcgg

SEQ ID NO: 881 - DNA, 23 bp, Artificial Sequence
  Description of Artificial Sequence: Synthetic oligonucleotide
aaaaatacaaaaatattagcggg

SEQ ID NO: 882 - DNA, 23 bp, Artificial Sequence
  Description of Artificial Sequence: Synthetic oligonucleotide
tacaaaaatattagcgggcgtgg

SEQ ID NO: 883 - DNA, 23 bp, Artificial Sequence
  Description of Artificial Sequence: Synthetic oligonucleotide
aaaaatattagcgggcgtggtgg

SEQ ID NO: 884 - DNA, 23 bp, Artificial Sequence
  Description of Artificial Sequence: Synthetic oligonucleotide
aatattagcgggcgtggtggcgg

SEQ ID NO: 885 - DNA, 23 bp, Artificial Sequence
  Description of Artificial Sequence: Synthetic oligonucleotide
atattagcgggcgtggtggcggg

SEQ ID NO: 886 - DNA, 23 bp, Artificial Sequence
  Description of Artificial Sequence: Synthetic oligonucleotide
tcccgagtagctgggactacagg

SEQ ID NO: 887 - DNA, 23 bp, Artificial Sequence
  Description of Artificial Sequence: Synthetic oligonucleotide
cctcagcctcccgagtagctggg

SEQ ID NO: 888 - DNA, 23 bp, Artificial Sequence
  Description of Artificial Sequence: Synthetic oligonucleotide
cacctgtagtcccagctactcgg

SEQ ID NO: 889 - DNA, 23 bp, Artificial Sequence
  Description of Artificial Sequence: Synthetic oligonucleotide
gcctcagcctcccgagtagctgg

SEQ ID NO: 890 - DNA, 23 bp, Artificial Sequence
  Description of Artificial Sequence: Synthetic oligonucleotide
acctgtagtcccagctactcggg

SEQ ID NO: 891 - DNA, 23 bp, Artificial Sequence
  Description of Artificial Sequence: Synthetic oligonucleotide
tgtagtcccagctactcgggagg

SEQ ID NO: 892 - DNA, 23 bp, Artificial Sequence
  Description of Artificial Sequence: Synthetic oligonucleotide
cccagctactcgggaggctgagg

SEQ ID NO: 893 - DNA, 23 bp, Artificial Sequence
  Description of Artificial Sequence: Synthetic oligonucleotide
gctactcgggaggctgaggcagg

SEQ ID NO: 894 - DNA, 23 bp, Artificial Sequence
  Description of Artificial Sequence: Synthetic oligonucleotide
gggaggctgaggcaggagaatgg

SEQ ID NO: 895 - DNA, 23 bp, Artificial Sequence
  Description of Artificial Sequence: Synthetic oligonucleotide
gcaggagaatggcgtgaacctgg

SEQ ID NO: 896 - DNA, 23 bp, Artificial Sequence
  Description of Artificial Sequence: Synthetic oligonucleotide
caggagaatggcgtgaacctggg

SEQ ID NO: 897 - DNA, 23 bp, Artificial Sequence
  Description of Artificial Sequence: Synthetic oligonucleotide
gagaatggcgtgaacctgggagg

SEQ ID NO: 898 - DNA, 23 bp, Artificial Sequence
  Description of Artificial Sequence: Synthetic oligonucleotide
aatggcgtgaacctgggaggcgg

SEQ ID NO: 899 - DNA, 23 bp, Artificial Sequence
  Description of Artificial Sequence: Synthetic oligonucleotide
cactgcaagctccgcctcccagg

SEQ ID NO: 900 - DNA, 23 bp, Artificial Sequence
  Description of Artificial Sequence: Synthetic oligonucleotide
ggactgcagtggcacgatcttgg

SEQ ID NO: 901 - DNA, 23 bp, Artificial Sequence
  Description of Artificial Sequence: Synthetic oligonucleotide
tcacccaggctggactgcagtgg

SEQ ID NO: 902 - DNA, 23 bp, Artificial Sequence
  Description of Artificial Sequence: Synthetic oligonucleotide
cgtgccactgcagtccagcctgg

SEQ ID NO: 903 - DNA, 23 bp, Artificial Sequence
  Description of Artificial Sequence: Synthetic oligonucleotide
gtgccactgcagtccagcctggg

SEQ ID NO: 904 - DNA, 23 bp, Artificial Sequence
  Description of Artificial Sequence: Synthetic oligonucleotide
tctcactctgtcacccaggctgg

SEQ ID NO: 905 - DNA, 23 bp, Artificial Sequence
  Description of Artificial Sequence: Synthetic oligonucleotide
ggtgtctcactctgtcacccagg

SEQ ID NO: 906 - DNA, 23 bp, Artificial Sequence
  Description of Artificial Sequence: Synthetic oligonucleotide
ttttttttttttttttgagacgg

SEQ ID NO: 907 - DNA, 23 bp, Artificial Sequence
  Description of Artificial Sequence: Synthetic oligonucleotide
aaaaaatcaatcagtactaaagg

SEQ ID NO: 908 - DNA, 23 bp, Artificial Sequence
  Description of Artificial Sequence: Synthetic oligonucleotide
agtagataatatacacacatggg

SEQ ID NO: 909 - DNA, 23 bp, Artificial Sequence
  Description of Artificial Sequence: Synthetic oligonucleotide
gagtagataatatacacacatgg

SEQ ID NO: 910 - DNA, 23 bp, Artificial Sequence
  Description of Artificial Sequence: Synthetic oligonucleotide
acttaattaaacacaaagccagg

SEQ ID NO: 911 - DNA, 23 bp, Artificial Sequence
  Description of Artificial Sequence: Synthetic oligonucleotide
agaagcaattaggtgaggcctgg

SEQ ID NO: 912 - DNA, 23 bp, Artificial Sequence
  Description of Artificial Sequence: Synthetic oligonucleotide
ttccaagaagcaattaggtgagg

SEQ ID NO: 913 - DNA, 23 bp, Artificial Sequence
  Description of Artificial Sequence: Synthetic oligonucleotide
tcaccttccaagaagcaattagg

SEQ ID NO: 914 - DNA, 23 bp, Artificial Sequence
  Description of Artificial Sequence: Synthetic oligonucleotide
ggcctcacctaattgcttcttgg

SEQ ID NO: 915 - DNA, 23 bp, Artificial Sequence
  Description of Artificial Sequence: Synthetic oligonucleotide
tcacctaattgcttcttggaagg

SEQ ID NO: 916 - DNA, 23 bp, Artificial Sequence
  Description of Artificial Sequence: Synthetic oligonucleotide
tttgcttggcactagcactctgg

SEQ ID NO: 917 - DNA, 23 bp, Artificial Sequence
  Description of Artificial Sequence: Synthetic oligonucleotide
atatagaagagttgtttgcttgg

SEQ ID NO: 918 - DNA, 23 bp, Artificial Sequence
  Description of Artificial Sequence: Synthetic oligonucleotide
cttctatatctcaagagccctgg

SEQ ID NO: 919 - DNA, 23 bp, Artificial Sequence
  Description of Artificial Sequence: Synthetic oligonucleotide
ttctatatctcaagagccctggg

SEQ ID NO: 920 - DNA, 23 bp, Artificial Sequence
  Description of Artificial Sequence: Synthetic oligonucleotide
agatggccctctgaagcccaggg

SEQ ID NO: 921 - DNA, 23 bp, Artificial Sequence
  Description of Artificial Sequence: Synthetic oligonucleotide
aagatggccctctgaagcccagg

SEQ ID NO: 922 - DNA, 23 bp, Artificial Sequence
  Description of Artificial Sequence: Synthetic oligonucleotide
tcaagagccctgggcttcagagg

SEQ ID NO: 923 - DNA, 23 bp, Artificial Sequence
  Description of Artificial Sequence: Synthetic oligonucleotide
caagagccctgggcttcagaggg

SEQ ID NO: 924 - DNA, 23 bp, Artificial Sequence
  Description of Artificial Sequence: Synthetic oligonucleotide
acttgaattaacaaaaaagatgg

SEQ ID NO: 925 - DNA, 23 bp, Artificial Sequence
  Description of Artificial Sequence: Synthetic oligonucleotide
aattcaagtttctctgaaaatgg

SEQ ID NO: 926 - DNA, 23 bp, Artificial Sequence
  Description of Artificial Sequence: Synthetic oligonucleotide
gccagcttgtcatcataaacggg

SEQ ID NO: 927 - DNA, 23 bp, Artificial Sequence
  Description of Artificial Sequence: Synthetic oligonucleotide
agccagcttgtcatcataaacgg

SEQ ID NO: 928 - DNA, 23 bp, Artificial Sequence
  Description of Artificial Sequence: Synthetic oligonucleotide
acccgtttatgatgacaagctgg

SEQ ID NO: 929 - DNA, 23 bp, Artificial Sequence
  Description of Artificial Sequence: Synthetic oligonucleotide
tatgatgacaagctggctacagg

SEQ ID NO: 930 - DNA, 23 bp, Artificial Sequence
  Description of Artificial Sequence: Synthetic oligonucleotide
atgatgacaagctggctacaggg

SEQ ID NO: 931 - DNA, 23 bp, Artificial Sequence
  Description of Artificial Sequence: Synthetic oligonucleotide
gcggcacccccgaaacagtgtgg

SEQ ID NO: 932 - DNA, 23 bp, Artificial Sequence
  Description of Artificial Sequence: Synthetic oligonucleotide
tagcatctgccacactgtttcgg

SEQ ID NO: 933 - DNA, 23 bp, Artificial Sequence
  Description of Artificial Sequence: Synthetic oligonucleotide
agcatctgccacactgtttcggg

SEQ ID NO: 934 - DNA, 23 bp, Artificial Sequence
  Description of Artificial Sequence: Synthetic oligonucleotide
gcatctgccacactgtttcgggg

SEQ ID NO: 935 - DNA, 23 bp, Artificial Sequence
  Description of Artificial Sequence: Synthetic oligonucleotide
catctgccacactgtttcggggg

SEQ ID NO: 936 - DNA, 23 bp, Artificial Sequence
  Description of Artificial Sequence: Synthetic oligonucleotide
cactgtttcgggggtgccgctgg

SEQ ID NO: 937 - DNA, 23 bp, Artificial Sequence
  Description of Artificial Sequence: Synthetic oligonucleotide
actgtttcgggggtgccgctggg

SEQ ID NO: 938 - DNA, 23 bp, Artificial Sequence
  Description of Artificial Sequence: Synthetic oligonucleotide
gggcaaatgcttcagcccagcgg

SEQ ID NO: 939 - DNA, 23 bp, Artificial Sequence
  Description of Artificial Sequence: Synthetic oligonucleotide
cgagctattgttaactagctggg

SEQ ID NO: 940 - DNA, 23 bp, Artificial Sequence
  Description of Artificial Sequence: Synthetic oligonucleotide
tcgagctattgttaactagctgg

SEQ ID NO: 941 - DNA, 23 bp, Artificial Sequence
  Description of Artificial Sequence: Synthetic oligonucleotide
tctcagcctggacactgataggg

SEQ ID NO: 942 - DNA, 23 bp, Artificial Sequence
  Description of Artificial Sequence: Synthetic oligonucleotide
ttctcagcctggacactgatagg

SEQ ID NO: 943 - DNA, 23 bp, Artificial Sequence
  Description of Artificial Sequence: Synthetic oligonucleotide
aacattccctatcagtgtccagg

SEQ ID NO: 944 - DNA, 23 bp, Artificial Sequence
  Description of Artificial Sequence: Synthetic oligonucleotide
cactgacagtattctcagcctgg

SEQ ID NO: 945 - DNA, 23 bp, Artificial Sequence
  Description of Artificial Sequence: Synthetic oligonucleotide
ctgtcagtgatgagtcgccttgg

SEQ ID NO: 946 - DNA, 23 bp, Artificial Sequence
  Description of Artificial Sequence: Synthetic oligonucleotide
agatacaggtacaagagccaagg

SEQ ID NO: 947 - DNA, 23 bp, Artificial Sequence
  Description of Artificial Sequence: Synthetic oligonucleotide
gtcctggcacacaaagatacagg

SEQ ID NO: 948 - DNA, 23 bp, Artificial Sequence
  Description of Artificial Sequence: Synthetic oligonucleotide
tacctgtatctttgtgtgccagg

SEQ ID NO: 949 - DNA, 23 bp, Artificial Sequence
  Description of Artificial Sequence: Synthetic oligonucleotide
tatctttgtgtgccaggacaagg

SEQ ID NO: 950 - DNA, 23 bp, Artificial Sequence
  Description of Artificial Sequence: Synthetic oligonucleotide
ctgttgcttgtgccttgtcctgg

SEQ ID NO: 951 - DNA, 23 bp, Artificial Sequence
  Description of Artificial Sequence: Synthetic oligonucleotide
cctgctcatcaggaacattttgg

SEQ ID NO: 952 - DNA, 23 bp, Artificial Sequence
  Description of Artificial Sequence: Synthetic oligonucleotide
gaggggttgacctgctcatcagg

SEQ ID NO: 953 - DNA, 23 bp, Artificial Sequence
  Description of Artificial Sequence: Synthetic oligonucleotide
ccaaaatgttcctgatgagcagg

SEQ ID NO: 954 - DNA, 23 bp, Artificial Sequence
  Description of Artificial Sequence: Synthetic oligonucleotide
tgatgagcaggtcaacccctcgg

SEQ ID NO: 955 - DNA, 23 bp, Artificial Sequence
  Description of Artificial Sequence: Synthetic oligonucleotide
gatgagcaggtcaacccctcggg

SEQ ID NO: 956 - DNA, 23 bp, Artificial Sequence
  Description of Artificial Sequence: Synthetic oligonucleotide
atgagcaggtcaacccctcgggg

SEQ ID NO: 957 - DNA, 23 bp, Artificial Sequence
  Description of Artificial Sequence: Synthetic oligonucleotide
tgagcaggtcaacccctcggggg

SEQ ID NO: 958 - DNA, 23 bp, Artificial Sequence
  Description of Artificial Sequence: Synthetic oligonucleotide
tatccaaacctgcccccgagggg

SEQ ID NO: 959 - DNA, 23 bp, Artificial Sequence
  Description of Artificial Sequence: Synthetic oligonucleotide
atatccaaacctgcccccgaggg

SEQ ID NO: 960 - DNA, 23 bp, Artificial Sequence
  Description of Artificial Sequence: Synthetic oligonucleotide
catatccaaacctgcccccgagg

SEQ ID NO: 961 - DNA, 23 bp, Artificial Sequence
  Description of Artificial Sequence: Synthetic oligonucleotide
caggtcaacccctcgggggcagg

SEQ ID NO: 962 - DNA, 23 bp, Artificial Sequence
  Description of Artificial Sequence: Synthetic oligonucleotide
caacccctcgggggcaggtttgg

SEQ ID NO: 963 - DNA, 23 bp, Artificial Sequence
  Description of Artificial Sequence: Synthetic oligonucleotide
caggtttggatatgataatgtgg

SEQ ID NO: 964 - DNA, 23 bp, Artificial Sequence
  Description of Artificial Sequence: Synthetic oligonucleotide
gatatgataatgtggtgatgtgg

SEQ ID NO: 965 - DNA, 23 bp, Artificial Sequence
  Description of Artificial Sequence: Synthetic oligonucleotide
atgataatgtggtgatgtggtgg

SEQ ID NO: 966 - DNA, 23 bp, Artificial Sequence
  Description of Artificial Sequence: Synthetic oligonucleotide
cccttgtgctcactgggtaaggg

SEQ ID NO: 967 - DNA, 23 bp, Artificial Sequence
  Description of Artificial Sequence: Synthetic oligonucleotide
ccccttgtgctcactgggtaagg

SEQ ID NO: 968 - DNA, 23 bp, Artificial Sequence
  Description of Artificial Sequence: Synthetic oligonucleotide
ggactccccttgtgctcactggg

SEQ ID NO: 969 - DNA, 23 bp, Artificial Sequence
  Description of Artificial Sequence: Synthetic oligonucleotide
aggactccccttgtgctcactgg

SEQ ID NO: 970 - DNA, 23 bp, Artificial Sequence
  Description of Artificial Sequence: Synthetic oligonucleotide
tcccttacccagtgagcacaagg

SEQ ID NO: 971 - DNA, 23 bp, Artificial Sequence
  Description of Artificial Sequence: Synthetic oligonucleotide
cccttacccagtgagcacaaggg

SEQ ID NO: 972 - DNA, 23 bp, Artificial Sequence
  Description of Artificial Sequence: Synthetic oligonucleotide
ccttacccagtgagcacaagggg

SEQ ID NO: 973 - DNA, 23 bp, Artificial Sequence
  Description of Artificial Sequence: Synthetic oligonucleotide
gagcacaaggggagtcctctagg

SEQ ID NO: 974 - DNA, 23 bp, Artificial Sequence
  Description of Artificial Sequence: Synthetic oligonucleotide
acatttcttccttttcctagagg

SEQ ID NO: 975 - DNA, 23 bp, Artificial Sequence
  Description of Artificial Sequence: Synthetic oligonucleotide
aaggggagtcctctaggaaaagg

SEQ ID NO: 976 - DNA, 23 bp, Artificial Sequence
  Description of Artificial Sequence: Synthetic oligonucleotide
taggaaaaggaagaaatgtctgg

SEQ ID NO: 977 - DNA, 23 bp, Artificial Sequence
  Description of Artificial Sequence: Synthetic oligonucleotide
aaggaagaaatgtctggatgagg

SEQ ID NO: 978 - DNA, 23 bp, Artificial Sequence
  Description of Artificial Sequence: Synthetic oligonucleotide
gaagaaatgtctggatgaggtgg

SEQ ID NO: 979 - DNA, 23 bp, Artificial Sequence
  Description of Artificial Sequence: Synthetic oligonucleotide
aagaaatgtctggatgaggtggg

SEQ ID NO: 980 - DNA, 23 bp, Artificial Sequence
  Description of Artificial Sequence: Synthetic oligonucleotide
agaaatgtctggatgaggtgggg

SEQ ID NO: 981 - DNA, 23 bp, Artificial Sequence
  Description of Artificial Sequence: Synthetic oligonucleotide
gtctggatgaggtggggagatgg

SEQ ID NO: 982 - DNA, 23 bp, Artificial Sequence
  Description of Artificial Sequence: Synthetic oligonucleotide
tctggatgaggtggggagatggg

SEQ ID NO: 983 - DNA, 23 bp, Artificial Sequence
  Description of Artificial Sequence: Synthetic oligonucleotide
ctggatgaggtggggagatgggg

SEQ ID NO: 984 - DNA, 23 bp, Artificial Sequence
  Description of Artificial Sequence: Synthetic oligonucleotide
tggggagatggggttcagagtgg

SEQ ID NO: 985 - DNA, 23 bp, Artificial Sequence
  Description of Artificial Sequence: Synthetic oligonucleotide
atggggttcagagtggactcagg

SEQ ID NO: 986 - DNA, 23 bp, Artificial Sequence
  Description of Artificial Sequence: Synthetic oligonucleotide
aacagctgggactgggcatcggg

SEQ ID NO: 987 - DNA, 23 bp, Artificial Sequence
  Description of Artificial Sequence: Synthetic oligonucleotide
caacagctgggactgggcatcgg

SEQ ID NO: 988 - DNA, 23 bp, Artificial Sequence
  Description of Artificial Sequence: Synthetic oligonucleotide
ctaggccaacagctgggactggg

SEQ ID NO: 989 - DNA, 23 bp, Artificial Sequence
  Description of Artificial Sequence: Synthetic oligonucleotide
actaggccaacagctgggactgg

SEQ ID NO: 990 - DNA, 23 bp, Artificial Sequence
  Description of Artificial Sequence: Synthetic oligonucleotide
cgatgcccagtcccagctgttgg

SEQ ID NO: 991 - DNA, 23 bp, Artificial Sequence
  Description of Artificial Sequence: Synthetic oligonucleotide
gtgagactaggccaacagctggg

SEQ ID NO: 992 - DNA, 23 bp, Artificial Sequence
  Description of Artificial Sequence: Synthetic oligonucleotide
tgtgagactaggccaacagctgg

SEQ ID NO: 993 - DNA, 23 bp, Artificial Sequence
  Description of Artificial Sequence: Synthetic oligonucleotide
ccttctggctttgtgagactagg

SEQ ID NO: 994 - DNA, 23 bp, Artificial Sequence
  Description of Artificial Sequence: Synthetic oligonucleotide
cctagtctcacaaagccagaagg

SEQ ID NO: 995 - DNA, 23 bp, Artificial Sequence
  Description of Artificial Sequence: Synthetic oligonucleotide
atgtaaatgtcatatccttctgg

SEQ ID NO: 996 - DNA, 23 bp, Artificial Sequence
  Description of Artificial Sequence: Synthetic oligonucleotide
acattcaactcttgaatttgtgg

SEQ ID NO: 997 - DNA, 23 bp, Artificial Sequence
  Description of Artificial Sequence: Synthetic oligonucleotide
tgaatttgtggccactgctttgg

SEQ ID NO: 998 - DNA, 23 bp, Artificial Sequence
  Description of Artificial Sequence: Synthetic oligonucleotide
tttgaagttgcccaaagcagtgg

SEQ ID NO: 999 - DNA, 23 bp, Artificial Sequence
  Description of Artificial Sequence: Synthetic oligonucleotide
gaatttgtggccactgctttggg

SEQ ID NO: 1000 - DNA, 23 bp, Artificial Sequence
  Description of Artificial Sequence: Synthetic oligonucleotide
ttatttgatataaaacttctagg

SEQ ID NO: 1001 - DNA, 23 bp, Artificial Sequence
  Description of Artificial Sequence: Synthetic oligonucleotide
taaaacttctaggacaagagagg

SEQ ID NO: 1002 - DNA, 23 bp, Artificial Sequence
  Description of Artificial Sequence: Synthetic oligonucleotide
aggacaagagaggcccttcctgg

SEQ ID NO: 1003 - DNA, 23 bp, Artificial Sequence
  Description of Artificial Sequence: Synthetic oligonucleotide
tacatgtaatgttccaggaaggg

SEQ ID NO: 1004 - DNA, 23 bp, Artificial Sequence
  Description of Artificial Sequence: Synthetic oligonucleotide
ctacatgtaatgttccaggaagg

SEQ ID NO: 1005 - DNA, 23 bp, Artificial Sequence
  Description of Artificial Sequence: Synthetic oligonucleotide
aatactacatgtaatgttccagg

SEQ ID NO: 1006 - DNA, 23 bp, Artificial Sequence
  Description of Artificial Sequence: Synthetic oligonucleotide
ggaacattacatgtagtattagg

SEQ ID NO: 1007 - DNA, 23 bp, Artificial Sequence
  Description of Artificial Sequence: Synthetic oligonucleotide
cattacatgtagtattaggaagg

SEQ ID NO: 1008 - DNA, 23 bp, Artificial Sequence
  Description of Artificial Sequence: Synthetic oligonucleotide
tacatgtagtattaggaaggtgg

SEQ ID NO: 1009 - DNA, 23 bp, Artificial Sequence
  Description of Artificial Sequence: Synthetic oligonucleotide
ttaggaaggtggagctgccctgg

SEQ ID NO: 1010 - DNA, 23 bp, Artificial Sequence
  Description of Artificial Sequence: Synthetic oligonucleotide
agttctctggatcttttccaggg

SEQ ID NO: 1011 - DNA, 23 bp, Artificial Sequence
  Description of Artificial Sequence: Synthetic oligonucleotide
gagttctctggatcttttccagg

SEQ ID NO: 1012 - DNA, 23 bp, Artificial Sequence
  Description of Artificial Sequence: Synthetic oligonucleotide
cttcctctctctgagttctctgg

SEQ ID NO: 1013 - DNA, 23 bp, Artificial Sequence
  Description of Artificial Sequence: Synthetic oligonucleotide
gatccagagaactcagagagagg

SEQ ID NO: 1014 - DNA, 23 bp, Artificial Sequence
  Description of Artificial Sequence: Synthetic oligonucleotide
gagaactcagagagaggaagagg

SEQ ID NO: 1015 - DNA, 23 bp, Artificial Sequence
  Description of Artificial Sequence: Synthetic oligonucleotide
aactcagagagaggaagaggtgg

SEQ ID NO: 1016 - DNA, 23 bp, Artificial Sequence
  Description of Artificial Sequence: Synthetic oligonucleotide
ctctctacaagaacagagatggg

SEQ ID NO: 1017 - DNA, 23 bp, Artificial Sequence
  Description of Artificial Sequence: Synthetic oligonucleotide
gctctctacaagaacagagatgg

SEQ ID NO: 1018 - DNA, 23 bp, Artificial Sequence
  Description of Artificial Sequence: Synthetic oligonucleotide
tgtagagagctcagtaagagtgg

SEQ ID NO: 1019 - DNA, 23 bp, Artificial Sequence
  Description of Artificial Sequence: Synthetic oligonucleotide
agagctcagtaagagtggcttgg

SEQ ID NO: 1020 - DNA, 23 bp, Artificial Sequence
  Description of Artificial Sequence: Synthetic oligonucleotide
ctcagtaagagtggcttggcagg

SEQ ID NO: 1021 - DNA, 23 bp, Artificial Sequence
  Description of Artificial Sequence: Synthetic oligonucleotide
tcagtaagagtggcttggcaggg

SEQ ID NO: 1022 - DNA, 23 bp, Artificial Sequence
  Description of Artificial Sequence: Synthetic oligonucleotide
ggtcttggtctcaggtacacagg

SEQ ID NO: 1023 - DNA, 23 bp, Artificial Sequence
  Description of Artificial Sequence: Synthetic oligonucleotide
tcctcactggtcttggtctcagg

SEQ ID NO: 1024 - DNA, 23 bp, Artificial Sequence
  Description of Artificial Sequence: Synthetic oligonucleotide
agtagcctcctcactggtcttgg

SEQ ID NO: 1025 - DNA, 23 bp, Artificial Sequence
  Description of Artificial Sequence: Synthetic oligonucleotide
acctgagaccaagaccagtgagg

SEQ ID NO: 1026 - DNA, 23 bp, Artificial Sequence
  Description of Artificial Sequence: Synthetic oligonucleotide
tgagaccaagaccagtgaggagg

SEQ ID NO: 1027 - DNA, 23 bp, Artificial Sequence
  Description of Artificial Sequence: Synthetic oligonucleotide
tcagacagtagcctcctcactgg

SEQ ID NO: 1028 - DNA, 23 bp, Artificial Sequence
  Description of Artificial Sequence: Synthetic oligonucleotide
gctactgtctgaccaccatacgg

SEQ ID NO: 1029 - DNA, 23 bp, Artificial Sequence
  Description of Artificial Sequence: Synthetic oligonucleotide
actgaattctgaccgtatggtgg

SEQ ID NO: 1030 - DNA, 23 bp, Artificial Sequence
  Description of Artificial Sequence: Synthetic oligonucleotide
ggcactgaattctgaccgtatgg

SEQ ID NO: 1031 - DNA, 23 bp, Artificial Sequence
  Description of Artificial Sequence: Synthetic oligonucleotide
acggtcagaattcagtgccatgg

SEQ ID NO: 1032 - DNA, 23 bp, Artificial Sequence
  Description of Artificial Sequence: Synthetic oligonucleotide
cggtcagaattcagtgccatggg

SEQ ID NO: 1033 - DNA, 23 bp, Artificial Sequence
  Description of Artificial Sequence: Synthetic oligonucleotide
tcagaattcagtgccatgggtgg

SEQ ID NO: 1034 - DNA, 23 bp, Artificial Sequence
  Description of Artificial Sequence: Synthetic oligonucleotide
ccttcccacctgaccacccatgg

SEQ ID NO: 1035 - DNA, 23 bp, Artificial Sequence
  Description of Artificial Sequence: Synthetic oligonucleotide
attcagtgccatgggtggtcagg

SEQ ID NO: 1036 - DNA, 23 bp, Artificial Sequence
  Description of Artificial Sequence: Synthetic oligonucleotide
cagtgccatgggtggtcaggtgg

SEQ ID NO: 1037 - DNA, 23 bp, Artificial Sequence
  Description of Artificial Sequence: Synthetic oligonucleotide
agtgccatgggtggtcaggtggg

SEQ ID NO: 1038 - DNA, 23 bp, Artificial Sequence
  Description of Artificial Sequence: Synthetic oligonucleotide
ccatgggtggtcaggtgggaagg

SEQ ID NO: 1039 - DNA, 23 bp, Artificial Sequence
  Description of Artificial Sequence: Synthetic oligonucleotide
catgggtggtcaggtgggaaggg

SEQ ID NO: 1040 - DNA, 23 bp, Artificial Sequence
  Description of Artificial Sequence: Synthetic oligonucleotide
atgggtggtcaggtgggaagggg

SEQ ID NO: 1041 - DNA, 23 bp, Artificial Sequence
  Description of Artificial Sequence: Synthetic oligonucleotide
tggtcaggtgggaaggggagagg

SEQ ID NO: 1042 - DNA, 23 bp, Artificial Sequence
  Description of Artificial Sequence: Synthetic oligonucleotide
ggaaggggagaggactgtgctgg

SEQ ID NO: 1043 - DNA, 23 bp, Artificial Sequence
  Description of Artificial Sequence: Synthetic oligonucleotide
ggggagaggactgtgctggctgg

SEQ ID NO: 1044 - DNA, 23 bp, Artificial Sequence
  Description of Artificial Sequence: Synthetic oligonucleotide
ggctggagttgatgttatcctgg

SEQ ID NO: 1045 - DNA, 23 bp, Artificial Sequence
  Description of Artificial Sequence: Synthetic oligonucleotide
gctggagttgatgttatcctggg

SEQ ID NO: 1046 - DNA, 23 bp, Artificial Sequence
  Description of Artificial Sequence: Synthetic oligonucleotide
ctggagttgatgttatcctgggg

SEQ ID NO: 1047 - DNA, 23 bp, Artificial Sequence
  Description of Artificial Sequence: Synthetic oligonucleotide
tctagggacctactttccccagg

SEQ ID NO: 1048 - DNA, 23 bp, Artificial Sequence
  Description of Artificial Sequence: Synthetic oligonucleotide
gatgttatcctggggaaagtagg

SEQ ID NO: 1049 - DNA, 23 bp, Artificial Sequence
  Description of Artificial Sequence: Synthetic oligonucleotide
cactcaactaaaggcatctaggg

SEQ ID NO: 1050 - DNA, 23 bp, Artificial Sequence
  Description of Artificial Sequence: Synthetic oligonucleotide
tcactcaactaaaggcatctagg

SEQ ID NO: 1051 - DNA, 23 bp, Artificial Sequence
  Description of Artificial Sequence: Synthetic oligonucleotide
tctgctcctcactcaactaaagg

SEQ ID NO: 1052 - DNA, 23 bp, Artificial Sequence
  Description of Artificial Sequence: Synthetic oligonucleotide
tagatgcctttagttgagtgagg

SEQ ID NO: 1053 - DNA, 23 bp, Artificial Sequence
  Description of Artificial Sequence: Synthetic oligonucleotide
tagttgagtgaggagcagactgg

SEQ ID NO: 1054 - DNA, 23 bp, Artificial Sequence
  Description of Artificial Sequence: Synthetic oligonucleotide
agttgagtgaggagcagactggg

SEQ ID NO: 1055 - DNA, 23 bp, Artificial Sequence
  Description of Artificial Sequence: Synthetic oligonucleotide
gtgaggagcagactgggaaatgg

SEQ ID NO: 1056 - DNA, 23 bp, Artificial Sequence
  Description of Artificial Sequence: Synthetic oligonucleotide
tgaggagcagactgggaaatggg

SEQ ID NO: 1057 - DNA, 23 bp, Artificial Sequence
  Description of Artificial Sequence: Synthetic oligonucleotide
gggaaatgggagcacagtagtgg

SEQ ID NO: 1058 - DNA, 23 bp, Artificial Sequence
  Description of Artificial Sequence: Synthetic oligonucleotide
aatgggagcacagtagtggttgg

SEQ ID NO: 1059 - DNA, 23 bp, Artificial Sequence
  Description of Artificial Sequence: Synthetic oligonucleotide
atgggagcacagtagtggttggg

SEQ ID NO: 1060 - DNA, 23 bp, Artificial Sequence
  Description of Artificial Sequence: Synthetic oligonucleotide
tgggagcacagtagtggttgggg

SEQ ID NO: 1061 - DNA, 23 bp, Artificial Sequence
  Description of Artificial Sequence: Synthetic oligonucleotide
cagtagtggttggggcaaaaagg

SEQ ID NO: 1062 - DNA, 23 bp, Artificial Sequence
  Description of Artificial Sequence: Synthetic oligonucleotide
aaaaggactgtctctgcatgagg

SEQ ID NO: 1063 - DNA, 23 bp, Artificial Sequence
  Description of Artificial Sequence: Synthetic oligonucleotide
tgtctctgcatgaggtccatagg

SEQ ID NO: 1064 - DNA, 23 bp, Artificial Sequence
  Description of Artificial Sequence: Synthetic oligonucleotide
gagaaaattccaactgcctatgg

SEQ ID NO: 1065 - DNA, 23 bp, Artificial Sequence
  Description of Artificial Sequence: Synthetic oligonucleotide
gcatgaggtccataggcagttgg

SEQ ID NO: 1066 - DNA, 23 bp, Artificial Sequence
  Description of Artificial Sequence: Synthetic oligonucleotide
tctcagcaagactccagagaagg

SEQ ID NO: 1067 - DNA, 23 bp, Artificial Sequence
  Description of Artificial Sequence: Synthetic oligonucleotide
tctgctccagcctccttctctgg

SEQ ID NO: 1068 - DNA, 23 bp, Artificial Sequence
  Description of Artificial Sequence: Synthetic oligonucleotide
cagcaagactccagagaaggagg

SEQ ID NO: 1069 - DNA, 23 bp, Artificial Sequence
  Description of Artificial Sequence: Synthetic oligonucleotide
aagactccagagaaggaggctgg

SEQ ID NO: 1070 - DNA, 23 bp, Artificial Sequence
  Description of Artificial Sequence: Synthetic oligonucleotide
agagaaggaggctggagcagagg

SEQ ID NO: 1071 - DNA, 23 bp, Artificial Sequence
  Description of Artificial Sequence: Synthetic oligonucleotide
gctggagcagaggtgtatgttgg

SEQ ID NO: 1072 - DNA, 23 bp, Artificial Sequence
  Description of Artificial Sequence: Synthetic oligonucleotide
ctggagcagaggtgtatgttggg

SEQ ID NO: 1073 - DNA, 23 bp, Artificial Sequence
  Description of Artificial Sequence: Synthetic oligonucleotide
aggtgtatgttgggatgaaaagg

SEQ ID NO: 1074 - DNA, 23 bp, Artificial Sequence
  Description of Artificial Sequence: Synthetic oligonucleotide
tgaaaaggagtaaagtatcatgg

SEQ ID NO: 1075 - DNA, 23 bp, Artificial Sequence
  Description of Artificial Sequence: Synthetic oligonucleotide
gaaaaggagtaaagtatcatggg

SEQ ID NO: 1076 - DNA, 23 bp, Artificial Sequence
  Description of Artificial Sequence: Synthetic oligonucleotide
aaaaggagtaaagtatcatgggg

SEQ ID NO: 1077 - DNA, 23 bp, Artificial Sequence
  Description of Artificial Sequence: Synthetic oligonucleotide
aaaggagtaaagtatcatggggg

SEQ ID NO: 1078 - DNA, 23 bp, Artificial Sequence
  Description of Artificial Sequence: Synthetic oligonucleotide
ggagtaaagtatcatgggggagg

SEQ ID NO: 1079 - DNA, 23 bp, Artificial Sequence
  Description of Artificial Sequence: Synthetic oligonucleotide
gtaaagtatcatgggggaggagg

SEQ ID NO: 1080 - DNA, 23 bp, Artificial Sequence
  Description of Artificial Sequence: Synthetic oligonucleotide
catgggggaggaggcagctcagg

SEQ ID NO: 1081 - DNA, 23 bp, Artificial Sequence
  Description of Artificial Sequence: Synthetic oligonucleotide
ggaggcagctcaggttgtcaagg

SEQ ID NO: 1082 - DNA, 23 bp, Artificial Sequence
  Description of Artificial Sequence: Synthetic oligonucleotide
gaggcagctcaggttgtcaaggg

SEQ ID NO: 1083 - DNA, 23 bp, Artificial Sequence
  Description of Artificial Sequence: Synthetic oligonucleotide
tcaagggtcaagaaaccagaagg

SEQ ID NO: 1084 - DNA, 23 bp, Artificial Sequence
  Description of Artificial Sequence: Synthetic oligonucleotide
ccaaggtgaaattctccttctgg

SEQ ID NO: 1085 - DNA, 23 bp, Artificial Sequence
  Description of Artificial Sequence: Synthetic oligonucleotide
ccagaaggagaatttcaccttgg

SEQ ID NO: 1086 - DNA, 23 bp, Artificial Sequence
  Description of Artificial Sequence: Synthetic oligonucleotide
gtacccgttgtctgcttccaagg

SEQ ID NO: 1087 - DNA, 23 bp, Artificial Sequence
  Description of Artificial Sequence: Synthetic oligonucleotide
ttcaccttggaagcagacaacgg

SEQ ID NO: 1088 - DNA, 23 bp, Artificial Sequence
  Description of Artificial Sequence: Synthetic oligonucleotide
tcaccttggaagcagacaacggg

SEQ ID NO: 1089 - DNA, 23 bp, Artificial Sequence
  Description of Artificial Sequence: Synthetic oligonucleotide
aaagtattcccctgtatgcttgg

SEQ ID NO: 1090 - DNA, 23 bp, Artificial Sequence
  Description of Artificial Sequence: Synthetic oligonucleotide
acaacgggtaccaagcatacagg

SEQ ID NO: 1091 - DNA, 23 bp, Artificial Sequence
  Description of Artificial Sequence: Synthetic oligonucleotide
caacgggtaccaagcatacaggg

SEQ ID NO: 1092 - DNA, 23 bp, Artificial Sequence
  Description of Artificial Sequence: Synthetic oligonucleotide
aacgggtaccaagcatacagggg

SEQ ID NO: 1093 - DNA, 23 bp, Artificial Sequence
  Description of Artificial Sequence: Synthetic oligonucleotide
gcatacaggggaatactttgtgg

SEQ ID NO: 1094 - DNA, 23 bp, Artificial Sequence
  Description of Artificial Sequence: Synthetic oligonucleotide
ggggaatactttgtggtgagagg

SEQ ID NO: 1095 - DNA, 23 bp, Artificial Sequence
  Description of Artificial Sequence: Synthetic oligonucleotide
gagaggtcacacagagatacagg

SEQ ID NO: 1096 - DNA, 23 bp, Artificial Sequence
  Description of Artificial Sequence: Synthetic oligonucleotide
cagagatacaggagccgacctgg

SEQ ID NO: 1097 - DNA, 23 bp, Artificial Sequence
  Description of Artificial Sequence: Synthetic oligonucleotide
aggctcctgtctcaccaggtcgg

SEQ ID NO: 1098 - DNA, 23 bp, Artificial Sequence
  Description of Artificial Sequence: Synthetic oligonucleotide
ctccaggctcctgtctcaccagg

SEQ ID NO: 1099 - DNA, 23 bp, Artificial Sequence
  Description of Artificial Sequence: Synthetic oligonucleotide
aggagccgacctggtgagacagg

SEQ ID NO: 1100 - DNA, 23 bp, Artificial Sequence
  Description of Artificial Sequence: Synthetic oligonucleotide
gacctggtgagacaggagcctgg

SEQ ID NO: 1101 - DNA, 23 bp, Artificial Sequence
  Description of Artificial Sequence: Synthetic oligonucleotide
aaaagcaggcaggtggctccagg

SEQ ID NO: 1102 - DNA, 23 bp, Artificial Sequence
  Description of Artificial Sequence: Synthetic oligonucleotide
gcctcacaaaagcaggcaggtgg

SEQ ID NO: 1103 - DNA, 23 bp, Artificial Sequence
  Description of Artificial Sequence: Synthetic oligonucleotide
ggggcctcacaaaagcaggcagg

SEQ ID NO: 1104 - DNA, 23 bp, Artificial Sequence
  Description of Artificial Sequence: Synthetic oligonucleotide
gtctggggcctcacaaaagcagg

SEQ ID NO: 1105 - DNA, 23 bp, Artificial Sequence
  Description of Artificial Sequence: Synthetic oligonucleotide
gccacctgcctgcttttgtgagg

SEQ ID NO: 1106 - DNA, 23 bp, Artificial Sequence
  Description of Artificial Sequence: Synthetic oligonucleotide
gatgatagcagtggagtctgggg

SEQ ID NO: 1107 - DNA, 23 bp, Artificial Sequence
  Description of Artificial Sequence: Synthetic oligonucleotide
tgatgatagcagtggagtctggg

SEQ ID NO: 1108 - DNA, 23 bp, Artificial Sequence
  Description of Artificial Sequence: Synthetic oligonucleotide
ctgatgatagcagtggagtctgg

SEQ ID NO: 1109 - DNA, 23 bp, Artificial Sequence
  Description of Artificial Sequence: Synthetic oligonucleotide
gcttcacctgatgatagcagtgg

SEQ ID NO: 1110 - DNA, 23 bp, Artificial Sequence
  Description of Artificial Sequence: Synthetic oligonucleotide
cagactccactgctatcatcagg

SEQ ID NO: 1111 - DNA, 23 bp, Artificial Sequence
  Description of Artificial Sequence: Synthetic oligonucleotide
gcagaaaagcttttgtgtgcagg

SEQ ID NO: 1112 - DNA, 23 bp, Artificial Sequence
  Description of Artificial Sequence: Synthetic oligonucleotide
tctgcatttacaaagagagaagg

SEQ ID NO: 1113 - DNA, 23 bp, Artificial Sequence
  Description of Artificial Sequence: Synthetic oligonucleotide
ctgcatttacaaagagagaaggg

SEQ ID NO: 1114 - DNA, 23 bp, Artificial Sequence
  Description of Artificial Sequence: Synthetic oligonucleotide
acgcattgcaccagaaactcagg

SEQ ID NO: 1115 - DNA, 23 bp, Artificial Sequence
  Description of Artificial Sequence: Synthetic oligonucleotide
gagagaagggcctgagtttctgg

SEQ ID NO: 1116 - DNA, 23 bp, Artificial Sequence
  Description of Artificial Sequence: Synthetic oligonucleotide
caatgcgtcaagctgacatatgg

SEQ ID NO: 1117 - DNA, 23 bp, Artificial Sequence
  Description of Artificial Sequence: Synthetic oligonucleotide
tgacatatggactttattacagg

SEQ ID NO: 1118 - DNA, 23 bp, Artificial Sequence
  Description of Artificial Sequence: Synthetic oligonucleotide
atggactttattacaggaagtgg

SEQ ID NO: 1119 - DNA, 23 bp, Artificial Sequence
  Description of Artificial Sequence: Synthetic oligonucleotide
ttacaggaagtggttaccagtgg

SEQ ID NO: 1120 - DNA, 23 bp, Artificial Sequence
  Description of Artificial Sequence: Synthetic oligonucleotide
tacaggaagtggttaccagtggg

SEQ ID NO: 1121 - DNA, 23 bp, Artificial Sequence
  Description of Artificial Sequence: Synthetic oligonucleotide
gccactaaatagggacccactgg

SEQ ID NO: 1122 - DNA, 23 bp, Artificial Sequence
  Description of Artificial Sequence: Synthetic oligonucleotide
acaataacagccactaaataggg

SEQ ID NO: 1123 - DNA, 23 bp, Artificial Sequence
  Description of Artificial Sequence: Synthetic oligonucleotide
accagtgggtccctatttagtgg

SEQ ID NO: 1124 - DNA, 23 bp, Artificial Sequence
  Description of Artificial Sequence: Synthetic oligonucleotide
cacaataacagccactaaatagg

SEQ ID NO: 1125 - DNA, 23 bp, Artificial Sequence
  Description of Artificial Sequence: Synthetic oligonucleotide
ttattgtgaattttattgttcgg

SEQ ID NO: 1126 - DNA, 23 bp, Artificial Sequence
  Description of Artificial Sequence: Synthetic oligonucleotide
gtatcactccggtgctatttagg

SEQ ID NO: 1127 - DNA, 23 bp, Artificial Sequence
  Description of Artificial Sequence: Synthetic oligonucleotide
tttcagatcctaaatagcaccgg

SEQ ID NO: 1128 - DNA, 23 bp, Artificial Sequence
  Description of Artificial Sequence: Synthetic oligonucleotide
gattagccattgtatcactccgg

SEQ ID NO: 1129 - DNA, 23 bp, Artificial Sequence
  Description of Artificial Sequence: Synthetic oligonucleotide
atagcaccggagtgatacaatgg

SEQ ID NO: 1130 - DNA, 23 bp, Artificial Sequence
  Description of Artificial Sequence: Synthetic oligonucleotide
caatggctaatcaaacaaagagg

SEQ ID NO: 1131 - DNA, 23 bp, Artificial Sequence
  Description of Artificial Sequence: Synthetic oligonucleotide
aatggctaatcaaacaaagaggg

SEQ ID NO: 1132 - DNA, 23 bp, Artificial Sequence
  Description of Artificial Sequence: Synthetic oligonucleotide
taatcaaacaaagagggctgtgg

SEQ ID NO: 1133 - DNA, 23 bp, Artificial Sequence
  Description of Artificial Sequence: Synthetic oligonucleotide
aatcaaacaaagagggctgtggg

SEQ ID NO: 1134 - DNA, 23 bp, Artificial Sequence
  Description of Artificial Sequence: Synthetic oligonucleotide
atcaaacaaagagggctgtgggg

SEQ ID NO: 1135 - DNA, 23 bp, Artificial Sequence
  Description of Artificial Sequence: Synthetic oligonucleotide
agggcctgaaatcacagaggggg

SEQ ID NO: 1136 - DNA, 23 bp, Artificial Sequence
  Description of Artificial Sequence: Synthetic oligonucleotide
cagggcctgaaatcacagagggg

SEQ ID NO: 1137 - DNA, 23 bp, Artificial Sequence
  Description of Artificial Sequence: Synthetic oligonucleotide
ccagggcctgaaatcacagaggg

SEQ ID NO: 1138 - DNA, 23 bp, Artificial Sequence
  Description of Artificial Sequence: Synthetic oligonucleotide
accagggcctgaaatcacagagg

SEQ ID NO: 1139 - DNA, 23 bp, Artificial Sequence
  Description of Artificial Sequence: Synthetic oligonucleotide
gcatccccctctgtgatttcagg

SEQ ID NO: 1140 - DNA, 23 bp, Artificial Sequence
  Description of Artificial Sequence: Synthetic oligonucleotide
ccctctgtgatttcaggccctgg

SEQ ID NO: 1141 - DNA, 23 bp, Artificial Sequence
  Description of Artificial Sequence: Synthetic oligonucleotide
tatggctactaatcaaaccaggg

SEQ ID NO: 1142 - DNA, 23 bp, Artificial Sequence
  Description of Artificial Sequence: Synthetic oligonucleotide
ttatggctactaatcaaaccagg

SEQ ID NO: 1143 - DNA, 23 bp, Artificial Sequence
  Description of Artificial Sequence: Synthetic oligonucleotide
gccacacgtaaaaaattttatgg

SEQ ID NO: 1144 - DNA, 23 bp, Artificial Sequence
  Description of Artificial Sequence: Synthetic oligonucleotide
gccataaaattttttacgtgtgg

SEQ ID NO: 1145 - DNA, 23 bp, Artificial Sequence
  Description of Artificial Sequence: Synthetic oligonucleotide
acgtgtggcactttgagcaaagg

SEQ ID NO: 1146 - DNA, 23 bp, Artificial Sequence
  Description of Artificial Sequence: Synthetic oligonucleotide
ggcactttgagcaaaggtgcagg

SEQ ID NO: 1147 - DNA, 23 bp, Artificial Sequence
  Description of Artificial Sequence: Synthetic oligonucleotide
agcaaaggtgcaggaaattgtgg

SEQ ID NO: 1148 - DNA, 23 bp, Artificial Sequence
  Description of Artificial Sequence: Synthetic oligonucleotide
aggtgcaggaaattgtggtcagg

SEQ ID NO: 1149 - DNA, 23 bp, Artificial Sequence
  Description of Artificial Sequence: Synthetic oligonucleotide
gaaattgtggtcaggaagcctgg

SEQ ID NO: 1150 - DNA, 23 bp, Artificial Sequence
  Description of Artificial Sequence: Synthetic oligonucleotide
aagcctgtcgagaggcagccagg

SEQ ID NO: 1151 - DNA, 23 bp, Artificial Sequence
  Description of Artificial Sequence: Synthetic oligonucleotide
aagcctggctgcctctcgacagg

SEQ ID NO: 1152 - DNA, 23 bp, Artificial Sequence
  Description of Artificial Sequence: Synthetic oligonucleotide
cacaaaggaagcctgtcgagagg

SEQ ID NO: 1153 - DNA, 23 bp, Artificial Sequence
  Description of Artificial Sequence: Synthetic oligonucleotide
tctccctggggctagcacaaagg

SEQ ID NO: 1154 - DNA, 23 bp, Artificial Sequence
  Description of Artificial Sequence: Synthetic oligonucleotide
gcttcctttgtgctagccccagg

SEQ ID NO: 1155 - DNA, 23 bp, Artificial Sequence
  Description of Artificial Sequence: Synthetic oligonucleotide
cttcctttgtgctagccccaggg

SEQ ID NO: 1156 - DNA, 23 bp, Artificial Sequence
  Description of Artificial Sequence: Synthetic oligonucleotide
aaataggcctcctctccctgggg

SEQ ID NO: 1157 - DNA, 23 bp, Artificial Sequence
  Description of Artificial Sequence: Synthetic oligonucleotide
tttgtgctagccccagggagagg

SEQ ID NO: 1158 - DNA, 23 bp, Artificial Sequence
  Description of Artificial Sequence: Synthetic oligonucleotide
taaataggcctcctctccctggg

SEQ ID NO: 1159 - DNA, 23 bp, Artificial Sequence
  Description of Artificial Sequence: Synthetic oligonucleotide
ttaaataggcctcctctccctgg

SEQ ID NO: 1160 - DNA, 23 bp, Artificial Sequence
  Description of Artificial Sequence: Synthetic oligonucleotide
gtgctagccccagggagaggagg

SEQ ID NO: 1161 - DNA, 23 bp, Artificial Sequence
  Description of Artificial Sequence: Synthetic oligonucleotide
cttggacttggctgttaaatagg

SEQ ID NO: 1162 - DNA, 23 bp, Artificial Sequence
  Description of Artificial Sequence: Synthetic oligonucleotide
ccatgatgtcaacttggacttgg

SEQ ID NO: 1163 - DNA, 23 bp, Artificial Sequence
  Description of Artificial Sequence: Synthetic oligonucleotide
ccagtcccatgatgtcaacttgg

SEQ ID NO: 1164 - DNA, 23 bp, Artificial Sequence
  Description of Artificial Sequence: Synthetic oligonucleotide
ccaagtccaagttgacatcatgg

SEQ ID NO: 1165 - DNA, 23 bp, Artificial Sequence
  Description of Artificial Sequence: Synthetic oligonucleotide
caagtccaagttgacatcatggg

SEQ ID NO: 1166 - DNA, 23 bp, Artificial Sequence
  Description of Artificial Sequence: Synthetic oligonucleotide
ccaagttgacatcatgggactgg

SEQ ID NO: 1167 - DNA, 23 bp, Artificial Sequence
  Description of Artificial Sequence: Synthetic oligonucleotide
gggactggaatagtcatagcagg

SEQ ID NO: 1168 - DNA, 23 bp, Artificial Sequence
  Description of Artificial Sequence: Synthetic oligonucleotide
gagctcagacatcataaacgtgg

SEQ ID NO: 1169 - DNA, 23 bp, Artificial Sequence
  Description of Artificial Sequence: Synthetic oligonucleotide
agacatcataaacgtggcatagg

SEQ ID NO: 1170 - DNA, 23 bp, Artificial Sequence
  Description of Artificial Sequence: Synthetic oligonucleotide
gacatcataaacgtggcataggg

SEQ ID NO: 1171 - DNA, 23 bp, Artificial Sequence
  Description of Artificial Sequence: Synthetic oligonucleotide
atcataaacgtggcatagggagg

SEQ ID NO: 1172 - DNA, 23 bp, Artificial Sequence
  Description of Artificial Sequence: Synthetic oligonucleotide
tcataaacgtggcatagggaggg

SEQ ID NO: 1173 - DNA, 23 bp, Artificial Sequence
  Description of Artificial Sequence: Synthetic oligonucleotide
aaacgtggcatagggagggctgg

SEQ ID NO: 1174 - DNA, 23 bp, Artificial Sequence
  Description of Artificial Sequence: Synthetic oligonucleotide
cgtggcatagggagggctggtgg

SEQ ID NO: 1175 - DNA, 23 bp, Artificial Sequence
  Description of Artificial Sequence: Synthetic oligonucleotide
ggcatagggagggctggtggagg

SEQ ID NO: 1176 - DNA, 23 bp, Artificial Sequence
  Description of Artificial Sequence: Synthetic oligonucleotide
agggctggtggaggagctagcgg

SEQ ID NO: 1177 - DNA, 23 bp, Artificial Sequence
  Description of Artificial Sequence: Synthetic oligonucleotide
gggctggtggaggagctagcggg

SEQ ID NO: 1178 - DNA, 23 bp, Artificial Sequence
  Description of Artificial Sequence: Synthetic oligonucleotide
ggtggaggagctagcgggtatgg

SEQ ID NO: 1179 - DNA, 23 bp, Artificial Sequence
  Description of Artificial Sequence: Synthetic oligonucleotide
gtggaggagctagcgggtatggg

SEQ ID NO: 1180 - DNA, 23 bp, Artificial Sequence
  Description of Artificial Sequence: Synthetic oligonucleotide
gaggagctagcgggtatgggtgg

SEQ ID NO: 1181 - DNA, 23 bp, Artificial Sequence
  Description of Artificial Sequence: Synthetic oligonucleotide
tgaaacaatttcaagacttttgg

SEQ ID NO: 1182 - DNA, 23 bp, Artificial Sequence
  Description of Artificial Sequence: Synthetic oligonucleotide
acaagtgcgaagcccttctctgg

SEQ ID NO: 1183 - DNA, 23 bp, Artificial Sequence
  Description of Artificial Sequence: Synthetic oligonucleotide
ctcatcttggctccagagaaggg

SEQ ID NO: 1184 - DNA, 23 bp, Artificial Sequence
  Description of Artificial Sequence: Synthetic oligonucleotide
gctcatcttggctccagagaagg

SEQ ID NO: 1185 - DNA, 23 bp, Artificial Sequence
  Description of Artificial Sequence: Synthetic oligonucleotide
agtgctctgccagctcatcttgg

SEQ ID NO: 1186 - DNA, 23 bp, Artificial Sequence
  Description of Artificial Sequence: Synthetic oligonucleotide
tctctggagccaagatgagctgg

SEQ ID NO: 1187 - DNA, 23 bp, Artificial Sequence
  Description of Artificial Sequence: Synthetic oligonucleotide
acacttgctactagagaaacagg

SEQ ID NO: 1188 - DNA, 23 bp, Artificial Sequence
  Description of Artificial Sequence: Synthetic oligonucleotide
tagcaagtgttcctttgcccagg

SEQ ID NO: 1189 - DNA, 23 bp, Artificial Sequence
  Description of Artificial Sequence: Synthetic oligonucleotide
atatttttgcccctgggcaaagg

SEQ ID NO: 1190 - DNA, 23 bp, Artificial Sequence
  Description of Artificial Sequence: Synthetic oligonucleotide
agcaagtgttcctttgcccaggg

SEQ ID NO: 1191 - DNA, 23 bp, Artificial Sequence
  Description of Artificial Sequence: Synthetic oligonucleotide
gcaagtgttcctttgcccagggg

SEQ ID NO: 1192 - DNA, 23 bp, Artificial Sequence
  Description of Artificial Sequence: Synthetic oligonucleotide
gtattaatatttttgcccctggg

SEQ ID NO: 1193 - DNA, 23 bp, Artificial Sequence
  Description of Artificial Sequence: Synthetic oligonucleotide
agtattaatatttttgcccctgg

SEQ ID NO: 1194 - DNA, 23 bp, Artificial Sequence
  Description of Artificial Sequence: Synthetic oligonucleotide
aagcattaatgcagtgctgaagg

SEQ ID NO: 1195 - DNA, 23 bp, Artificial Sequence
  Description of Artificial Sequence: Synthetic oligonucleotide
tccccagtgccctgcccagaagg

SEQ ID NO: 1196 - DNA, 23 bp, Artificial Sequence
  Description of Artificial Sequence: Synthetic oligonucleotide
agtaggtgtccttctgggcaggg

SEQ ID NO: 1197 - DNA, 23 bp, Artificial Sequence
  Description of Artificial Sequence: Synthetic oligonucleotide
tgtccttctgggcagggcactgg

SEQ ID NO: 1198 - DNA, 23 bp, Artificial Sequence
  Description of Artificial Sequence: Synthetic oligonucleotide
gtccttctgggcagggcactggg

SEQ ID NO: 1199 - DNA, 23 bp, Artificial Sequence
  Description of Artificial Sequence: Synthetic oligonucleotide
tccttctgggcagggcactgggg

SEQ ID NO: 1200 - DNA, 23 bp, Artificial Sequence
  Description of Artificial Sequence: Synthetic oligonucleotide
actggggacagctgacgtgaagg

SEQ ID NO: 1201 - DNA, 23 bp, Artificial Sequence
  Description of Artificial Sequence: Synthetic oligonucleotide
aaggttgtgggatataagggagg

SEQ ID NO: 1202 - DNA, 23 bp, Artificial Sequence
  Description of Artificial Sequence: Synthetic oligonucleotide
accaaggttgtgggatataaggg

SEQ ID NO: 1203 - DNA, 23 bp, Artificial Sequence
  Description of Artificial Sequence: Synthetic oligonucleotide
gaccaaggttgtgggatataagg

SEQ ID NO: 1204 - DNA, 23 bp, Artificial Sequence
  Description of Artificial Sequence: Synthetic oligonucleotide
cctcttgggaccaaggttgtggg

SEQ ID NO: 1205 - DNA, 23 bp, Artificial Sequence
  Description of Artificial Sequence: Synthetic oligonucleotide
tcccttatatcccacaaccttgg

SEQ ID NO: 1206 - DNA, 23 bp, Artificial Sequence
  Description of Artificial Sequence: Synthetic oligonucleotide
tcctcttgggaccaaggttgtgg

SEQ ID NO: 1207 - DNA, 23 bp, Artificial Sequence
  Description of Artificial Sequence: Synthetic oligonucleotide
tttttttcctcttgggaccaagg

SEQ ID NO: 1208 - DNA, 23 bp, Artificial Sequence
  Description of Artificial Sequence: Synthetic oligonucleotide
cccacaaccttggtcccaagagg

SEQ ID NO: 1209 - DNA, 23 bp, Artificial Sequence
  Description of Artificial Sequence: Synthetic oligonucleotide
atcttcttttttttcctcttggg

SEQ ID NO: 1210 - DNA, 23 bp, Artificial Sequence
  Description of Artificial Sequence: Synthetic oligonucleotide
catcttcttttttttcctcttgg

SEQ ID NO: 1211 - DNA, 23 bp, Artificial Sequence
  Description of Artificial Sequence: Synthetic oligonucleotide
caagaggaaaaaaaagaagatgg

SEQ ID NO: 1212 - DNA, 23 bp, Artificial Sequence
  Description of Artificial Sequence: Synthetic oligonucleotide
gtatgggtctggggtctgcttgg

SEQ ID NO: 1213 - DNA, 23 bp, Artificial Sequence
  Description of Artificial Sequence: Synthetic oligonucleotide
gaggcactagtatgggtctgggg

SEQ ID NO: 1214 - DNA, 23 bp, Artificial Sequence
  Description of Artificial Sequence: Synthetic oligonucleotide
ggaggcactagtatgggtctggg

SEQ ID NO: 1215 - DNA, 23 bp, Artificial Sequence
  Description of Artificial Sequence: Synthetic oligonucleotide
aggaggcactagtatgggtctgg

SEQ ID NO: 1216 - DNA, 23 bp, Artificial Sequence
  Description of Artificial Sequence: Synthetic oligonucleotide
aggaaaggaggcactagtatggg

SEQ ID NO: 1217 - DNA, 23 bp, Artificial Sequence
  Description of Artificial Sequence: Synthetic oligonucleotide
caggaaaggaggcactagtatgg

SEQ ID NO: 1218 - DNA, 23 bp, Artificial Sequence
  Description of Artificial Sequence: Synthetic oligonucleotide
gggatatgaaacaggaaaggagg

SEQ ID NO: 1219 - DNA, 23 bp, Artificial Sequence
  Description of Artificial Sequence: Synthetic oligonucleotide
acagggatatgaaacaggaaagg

SEQ ID NO: 1220 - DNA, 23 bp, Artificial Sequence
  Description of Artificial Sequence: Synthetic oligonucleotide
gctgcacagggatatgaaacagg

SEQ ID NO: 1221 - DNA, 23 bp, Artificial Sequence
  Description of Artificial Sequence: Synthetic oligonucleotide
agatcccagctggctgcacaggg

SEQ ID NO: 1222 - DNA, 23 bp, Artificial Sequence
  Description of Artificial Sequence: Synthetic oligonucleotide
gagatcccagctggctgcacagg

SEQ ID NO: 1223 - DNA, 23 bp, Artificial Sequence
  Description of Artificial Sequence: Synthetic oligonucleotide
catatccctgtgcagccagctgg

SEQ ID NO: 1224 - DNA, 23 bp, Artificial Sequence
  Description of Artificial Sequence: Synthetic oligonucleotide
atatccctgtgcagccagctggg

SEQ ID NO: 1225 - DNA, 23 bp, Artificial Sequence
  Description of Artificial Sequence: Synthetic oligonucleotide
attattcaagagatcccagctgg

SEQ ID NO: 1226 - DNA, 23 bp, Artificial Sequence
  Description of Artificial Sequence: Synthetic oligonucleotide
atctcttgaataatctgctctgg

SEQ ID NO: 1227 - DNA, 23 bp, Artificial Sequence
  Description of Artificial Sequence: Synthetic oligonucleotide
tctcttgaataatctgctctggg

SEQ ID NO: 1228 - DNA, 23 bp, Artificial Sequence
  Description of Artificial Sequence: Synthetic oligonucleotide
ctcttgaataatctgctctgggg

SEQ ID NO: 1229 - DNA, 23 bp, Artificial Sequence
  Description of Artificial Sequence: Synthetic oligonucleotide
tcttgaataatctgctctggggg

SEQ ID NO: 1230 - DNA, 23 bp, Artificial Sequence
  Description of Artificial Sequence: Synthetic oligonucleotide
tgctctgggggcactgagattgg

SEQ ID NO: 1231 - DNA, 23 bp, Artificial Sequence
  Description of Artificial Sequence: Synthetic oligonucleotide
attggacatacaccaaacagcgg

SEQ ID NO: 1232 - DNA, 23 bp, Artificial Sequence
  Description of Artificial Sequence: Synthetic oligonucleotide
tttggtcgatctccgctgtttgg

SEQ ID NO: 1233 - DNA, 23 bp, Artificial Sequence
  Description of Artificial Sequence: Synthetic oligonucleotide
cactgcccaacagaggcgtttgg

SEQ ID NO: 1234 - DNA, 23 bp, Artificial Sequence
  Description of Artificial Sequence: Synthetic oligonucleotide
gatcgaccaaacgcctctgttgg

SEQ ID NO: 1235 - DNA, 23 bp, Artificial Sequence
  Description of Artificial Sequence: Synthetic oligonucleotide
atcgaccaaacgcctctgttggg

SEQ ID NO: 1236 - DNA, 23 bp, Artificial Sequence
  Description of Artificial Sequence: Synthetic oligonucleotide
caggaaacactgcccaacagagg

SEQ ID NO: 1237 - DNA, 23 bp, Artificial Sequence
  Description of Artificial Sequence: Synthetic oligonucleotide
ctgttgggcagtgtttcctgagg

SEQ ID NO: 1238 - DNA, 23 bp, Artificial Sequence
  Description of Artificial Sequence: Synthetic oligonucleotide
tgttgggcagtgtttcctgaggg

SEQ ID NO: 1239 - DNA, 23 bp, Artificial Sequence
  Description of Artificial Sequence: Synthetic oligonucleotide
cagaatgggacagaaccctcagg

SEQ ID NO: 1240 - DNA, 23 bp, Artificial Sequence
  Description of Artificial Sequence: Synthetic oligonucleotide
agcctcctagtttacagaatggg

SEQ ID NO: 1241 - DNA, 23 bp, Artificial Sequence
  Description of Artificial Sequence: Synthetic oligonucleotide
cagcctcctagtttacagaatgg

SEQ ID NO: 1242 - DNA, 23 bp, Artificial Sequence
  Description of Artificial Sequence: Synthetic oligonucleotide
tctgtcccattctgtaaactagg

SEQ ID NO: 1243 - DNA, 23 bp, Artificial Sequence
  Description of Artificial Sequence: Synthetic oligonucleotide
gtcccattctgtaaactaggagg

SEQ ID NO: 1244 - DNA, 23 bp, Artificial Sequence
  Description of Artificial Sequence: Synthetic oligonucleotide
aggaggctgactagctgacaagg

SEQ ID NO: 1245 - DNA, 23 bp, Artificial Sequence
  Description of Artificial Sequence: Synthetic oligonucleotide
gacaaggaattttattctgttgg

SEQ ID NO: 1246 - DNA, 23 bp, Artificial Sequence
  Description of Artificial Sequence: Synthetic oligonucleotide
acaaggaattttattctgttggg

SEQ ID NO: 1247 - DNA, 23 bp, Artificial Sequence
  Description of Artificial Sequence: Synthetic oligonucleotide
tcttaccccaggtggcacatagg

SEQ ID NO: 1248 - DNA, 23 bp, Artificial Sequence
  Description of Artificial Sequence: Synthetic oligonucleotide
acatgaacctatgtgccacctgg

SEQ ID NO: 1249 - DNA, 23 bp, Artificial Sequence
  Description of Artificial Sequence: Synthetic oligonucleotide
catgaacctatgtgccacctggg

SEQ ID NO: 1250 - DNA, 23 bp, Artificial Sequence
  Description of Artificial Sequence: Synthetic oligonucleotide
atgaacctatgtgccacctgggg

SEQ ID NO: 1251 - DNA, 23 bp, Artificial Sequence
  Description of Artificial Sequence: Synthetic oligonucleotide
ccacagggtcttaccccaggtgg

SEQ ID NO: 1252 - DNA, 23 bp, Artificial Sequence
  Description of Artificial Sequence: Synthetic oligonucleotide
ctaccacagggtcttaccccagg

SEQ ID NO: 1253 - DNA, 23 bp, Artificial Sequence
  Description of Artificial Sequence: Synthetic oligonucleotide
ccacctggggtaagaccctgtgg

SEQ ID NO: 1254 - DNA, 23 bp, Artificial Sequence
  Description of Artificial Sequence: Synthetic oligonucleotide
ctggggtaagaccctgtggtagg

SEQ ID NO: 1255 - DNA, 23 bp, Artificial Sequence
  Description of Artificial Sequence: Synthetic oligonucleotide
tcatgtttctacctaccacaggg

SEQ ID NO: 1256 - DNA, 23 bp, Artificial Sequence
  Description of Artificial Sequence: Synthetic oligonucleotide
gtcatgtttctacctaccacagg

SEQ ID NO: 1257 - DNA, 23 bp, Artificial Sequence
  Description of Artificial Sequence: Synthetic oligonucleotide
attaggatgtggacatttttggg

SEQ ID NO: 1258 - DNA, 23 bp, Artificial Sequence
  Description of Artificial Sequence: Synthetic oligonucleotide
gattaggatgtggacatttttgg

SEQ ID NO: 1259 - DNA, 23 bp, Artificial Sequence
  Description of Artificial Sequence: Synthetic oligonucleotide
cagaattagagattaggatgtgg

SEQ ID NO: 1260 - DNA, 23 bp, Artificial Sequence
  Description of Artificial Sequence: Synthetic oligonucleotide
tatttacagaattagagattagg

SEQ ID NO: 1261 - DNA, 23 bp, Artificial Sequence
  Description of Artificial Sequence: Synthetic oligonucleotide
ctgtaaatatattcccttactgg

SEQ ID NO: 1262 - DNA, 23 bp, Artificial Sequence
  Description of Artificial Sequence: Synthetic oligonucleotide
aaagtctctttttccagtaaggg

SEQ ID NO: 1263 - DNA, 23 bp, Artificial Sequence
  Description of Artificial Sequence: Synthetic oligonucleotide
caaagtctctttttccagtaagg

SEQ ID NO: 1264 - DNA, 23 bp, Artificial Sequence
  Description of Artificial Sequence: Synthetic oligonucleotide
actggaaaaagagactttgcagg

SEQ ID NO: 1265 - DNA, 23 bp, Artificial Sequence
  Description of Artificial Sequence: Synthetic oligonucleotide
ttgcaggtgtgattaaattaagg

SEQ ID NO: 1266 - DNA, 23 bp, Artificial Sequence
  Description of Artificial Sequence: Synthetic oligonucleotide
attaaattaaggatcataagagg

SEQ ID NO: 1267 - DNA, 23 bp, Artificial Sequence
  Description of Artificial Sequence: Synthetic oligonucleotide
ttaaattaaggatcataagaggg

SEQ ID NO: 1268 - DNA, 23 bp, Artificial Sequence
  Description of Artificial Sequence: Synthetic oligonucleotide
ataagagggagagattatccagg

SEQ ID NO: 1269 - DNA, 23 bp, Artificial Sequence
  Description of Artificial Sequence: Synthetic oligonucleotide
ttagactcatcaaataatcctgg

SEQ ID NO: 1270 - DNA, 23 bp, Artificial Sequence
  Description of Artificial Sequence: Synthetic oligonucleotide
atgagtctaatataatcatcagg

SEQ ID NO: 1271 - DNA, 23 bp, Artificial Sequence
  Description of Artificial Sequence: Synthetic oligonucleotide
tgagtctaatataatcatcaggg

SEQ ID NO: 1272 - DNA, 23 bp, Artificial Sequence
  Description of Artificial Sequence: Synthetic oligonucleotide
atcatcagggtacttaaaagagg

SEQ ID NO: 1273 - DNA, 23 bp, Artificial Sequence
  Description of Artificial Sequence: Synthetic oligonucleotide
tcatcagggtacttaaaagaggg

SEQ ID NO: 1274 - DNA, 23 bp, Artificial Sequence
  Description of Artificial Sequence: Synthetic oligonucleotide
tcagggtacttaaaagagggagg

SEQ ID NO: 1275 - DNA, 23 bp, Artificial Sequence
  Description of Artificial Sequence: Synthetic oligonucleotide
ggtacttaaaagagggaggcagg

SEQ ID NO: 1276 - DNA, 23 bp, Artificial Sequence
  Description of Artificial Sequence: Synthetic oligonucleotide
agagggaggcaggctgtgcctgg

SEQ ID NO: 1277 - DNA, 23 bp, Artificial Sequence
  Description of Artificial Sequence: Synthetic oligonucleotide
gggaggcaggctgtgcctggtgg

SEQ ID NO: 1278 - DNA, 23 bp, Artificial Sequence
  Description of Artificial Sequence: Synthetic oligonucleotide
gattaaaggcgtgaaccaccagg

SEQ ID NO: 1279 - DNA, 23 bp, Artificial Sequence
  Description of Artificial Sequence: Synthetic oligonucleotide
tcccaaagtgctgggattaaagg

SEQ ID NO: 1280 - DNA, 23 bp, Artificial Sequence
  Description of Artificial Sequence: Synthetic oligonucleotide
cctcagtctcccaaagtgctggg

SEQ ID NO: 1281 - DNA, 23 bp, Artificial Sequence
  Description of Artificial Sequence: Synthetic oligonucleotide
cgcctttaatcccagcactttgg

SEQ ID NO: 1282 - DNA, 23 bp, Artificial Sequence
  Description of Artificial Sequence: Synthetic oligonucleotide
gcctcagtctcccaaagtgctgg

SEQ ID NO: 1283 - DNA, 23 bp, Artificial Sequence
  Description of Artificial Sequence: Synthetic oligonucleotide
gcctttaatcccagcactttggg

SEQ ID NO: 1284 - DNA, 23 bp, Artificial Sequence
  Description of Artificial Sequence: Synthetic oligonucleotide
cccagcactttgggagactgagg

SEQ ID NO: 1285 - DNA, 23 bp, Artificial Sequence
  Description of Artificial Sequence: Synthetic oligonucleotide
ctttgggagactgaggcgagcgg

SEQ ID NO: 1286 - DNA, 23 bp, Artificial Sequence
  Description of Artificial Sequence: Synthetic oligonucleotide
tttgggagactgaggcgagcggg

SEQ ID NO: 1287 - DNA, 23 bp, Artificial Sequence
  Description of Artificial Sequence: Synthetic oligonucleotide
actgaggcgagcgggtcacgagg

SEQ ID NO: 1288 - DNA, 23 bp, Artificial Sequence
  Description of Artificial Sequence: Synthetic oligonucleotide
ggcgagcgggtcacgaggacagg

SEQ ID NO: 1289 - DNA, 23 bp, Artificial Sequence
  Description of Artificial Sequence: Synthetic oligonucleotide
cgggtcacgaggacaggagttgg

SEQ ID NO: 1290 - DNA, 23 bp, Artificial Sequence
  Description of Artificial Sequence: Synthetic oligonucleotide
tttcaccatgttggtcaggctgg

SEQ ID NO: 1291 - DNA, 23 bp, Artificial Sequence
  Description of Artificial Sequence: Synthetic oligonucleotide
ggagtttcaccatgttggtcagg

SEQ ID NO: 1292 - DNA, 23 bp, Artificial Sequence
  Description of Artificial Sequence: Synthetic oligonucleotide
ggagaccagcctgaccaacatgg

SEQ ID NO: 1293 - DNA, 23 bp, Artificial Sequence
  Description of Artificial Sequence: Synthetic oligonucleotide
gagggggagtttcaccatgttgg

SEQ ID NO: 1294 - DNA, 23 bp, Artificial Sequence
  Description of Artificial Sequence: Synthetic oligonucleotide
atttttttttttactagaggggg

SEQ ID NO: 1295 - DNA, 23 bp, Artificial Sequence
  Description of Artificial Sequence: Synthetic oligonucleotide
tatttttttttttactagagggg

SEQ ID NO: 1296 - DNA, 23 bp, Artificial Sequence
  Description of Artificial Sequence: Synthetic oligonucleotide
gtatttttttttttactagaggg

SEQ ID NO: 1297 - DNA, 23 bp, Artificial Sequence
  Description of Artificial Sequence: Synthetic oligonucleotide
tgtatttttttttttactagagg

SEQ ID NO: 1298 - DNA, 23 bp, Artificial Sequence
  Description of Artificial Sequence: Synthetic oligonucleotide
aaaaaatacaaaaattagccagg

SEQ ID NO: 1299 - DNA, 23 bp, Artificial Sequence
  Description of Artificial Sequence: Synthetic oligonucleotide
atacaaaaattagccaggcatgg

SEQ ID NO: 1300 - DNA, 23 bp, Artificial Sequence
  Description of Artificial Sequence: Synthetic oligonucleotide
caggtgtgtaccaccatgcctgg

SEQ ID NO: 1301 - DNA, 23 bp, Artificial Sequence
  Description of Artificial Sequence: Synthetic oligonucleotide
caaaaattagccaggcatggtgg

SEQ ID NO: 1302 - DNA, 23 bp, Artificial Sequence
  Description of Artificial Sequence: Synthetic oligonucleotide
tcctgagtagctgggattacagg

SEQ ID NO: 1303 - DNA, 23 bp, Artificial Sequence
  Description of Artificial Sequence: Synthetic oligonucleotide
cctcagcctcctgagtagctggg

SEQ ID NO: 1304 - DNA, 23 bp, Artificial Sequence
  Description of Artificial Sequence: Synthetic oligonucleotide
gcctcagcctcctgagtagctgg

SEQ ID NO: 1305 - DNA, 23 bp, Artificial Sequence
  Description of Artificial Sequence: Synthetic oligonucleotide
acctgtaatcccagctactcagg

SEQ ID NO: 1306 - DNA, 23 bp, Artificial Sequence
  Description of Artificial Sequence: Synthetic oligonucleotide
tgtaatcccagctactcaggagg

SEQ ID NO: 1307 - DNA, 23 bp, Artificial Sequence
  Description of Artificial Sequence: Synthetic oligonucleotide
cccagctactcaggaggctgagg

SEQ ID NO: 1308 - DNA, 23 bp, Artificial Sequence
  Description of Artificial Sequence: Synthetic oligonucleotide
agctactcaggaggctgaggcgg

SEQ ID NO: 1309 - DNA, 23 bp, Artificial Sequence
  Description of Artificial Sequence: Synthetic oligonucleotide
gctactcaggaggctgaggcggg

SEQ ID NO: 1310 - DNA, 23 bp, Artificial Sequence
  Description of Artificial Sequence: Synthetic oligonucleotide
cgggagaattgcttgaacccagg

SEQ ID NO: 1311 - DNA, 23 bp, Artificial Sequence
  Description of Artificial Sequence: Synthetic oligonucleotide
gagaattgcttgaacccaggagg

SEQ ID NO: 1312 - DNA, 23 bp, Artificial Sequence
  Description of Artificial Sequence: Synthetic oligonucleotide
caccacaacctctgcctcctggg

SEQ ID NO: 1313 - DNA, 23 bp, Artificial Sequence
  Description of Artificial Sequence: Synthetic oligonucleotide
tcaccacaacctctgcctcctgg

SEQ ID NO: 1314 - DNA, 23 bp, Artificial Sequence
  Description of Artificial Sequence: Synthetic oligonucleotide
tgcttgaacccaggaggcagagg

SEQ ID NO: 1315 - DNA, 23 bp, Artificial Sequence
  Description of Artificial Sequence: Synthetic oligonucleotide
aacccaggaggcagaggttgtgg

SEQ ID NO: 1316 - DNA, 23 bp, Artificial Sequence
  Description of Artificial Sequence: Synthetic oligonucleotide
ttgcccaggctggagggcagtgg

SEQ ID NO: 1317 - DNA, 23 bp, Artificial Sequence
  Description of Artificial Sequence: Synthetic oligonucleotide
gctctgttgcccaggctggaggg

SEQ ID NO: 1318 - DNA, 23 bp, Artificial Sequence
  Description of Artificial Sequence: Synthetic oligonucleotide
cgcaccactgccctccagcctgg

SEQ ID NO: 1319 - DNA, 23 bp, Artificial Sequence
  Description of Artificial Sequence: Synthetic oligonucleotide
tgctctgttgcccaggctggagg

SEQ ID NO: 1320 - DNA, 23 bp, Artificial Sequence
  Description of Artificial Sequence: Synthetic oligonucleotide
gcaccactgccctccagcctggg

SEQ ID NO: 1321 - DNA, 23 bp, Artificial Sequence
  Description of Artificial Sequence: Synthetic oligonucleotide
tcttgctctgttgcccaggctgg

SEQ ID NO: 1322 - DNA, 23 bp, Artificial Sequence
  Description of Artificial Sequence: Synthetic oligonucleotide
ggagtcttgctctgttgcccagg

SEQ ID NO: 1323 - DNA, 23 bp, Artificial Sequence
  Description of Artificial Sequence: Synthetic oligonucleotide
ctctttttttttttttgagatgg

SEQ ID NO: 1324 - DNA, 23 bp, Artificial Sequence
  Description of Artificial Sequence: Synthetic oligonucleotide
catctcaaaaaaaaaaaaagagg

SEQ ID NO: 1325 - DNA, 23 bp, Artificial Sequence
  Description of Artificial Sequence: Synthetic oligonucleotide
atctcaaaaaaaaaaaaagaggg

SEQ ID NO: 1326 - DNA, 23 bp, Artificial Sequence
  Description of Artificial Sequence: Synthetic oligonucleotide
tcaaaaaaaaaaaaagagggagg

SEQ ID NO: 1327 - DNA, 23 bp, Artificial Sequence
  Description of Artificial Sequence: Synthetic oligonucleotide
aaaaaaaaagagggaggcagtgg

SEQ ID NO: 1328 - DNA, 23 bp, Artificial Sequence
  Description of Artificial Sequence: Synthetic oligonucleotide
aaaaaaaagagggaggcagtggg

SEQ ID NO: 1329 - DNA, 23 bp, Artificial Sequence
  Description of Artificial Sequence: Synthetic oligonucleotide
agtgggatcagagtcagagaagg

SEQ ID NO: 1330 - DNA, 23 bp, Artificial Sequence
  Description of Artificial Sequence: Synthetic oligonucleotide
tgcctgcattccttggcttgtgg

SEQ ID NO: 1331 - DNA, 23 bp, Artificial Sequence
  Description of Artificial Sequence: Synthetic oligonucleotide
agtgatgcaaccacaagccaagg

SEQ ID NO: 1332 - DNA, 23 bp, Artificial Sequence
  Description of Artificial Sequence: Synthetic oligonucleotide
gagaagctgcctgcattccttgg

SEQ ID NO: 1333 - DNA, 23 bp, Artificial Sequence
  Description of Artificial Sequence: Synthetic oligonucleotide
aaccacaagccaaggaatgcagg

SEQ ID NO: 1334 - DNA, 23 bp, Artificial Sequence
  Description of Artificial Sequence: Synthetic oligonucleotide
tgcaggcagcttctcaaagctgg

SEQ ID NO: 1335 - DNA, 23 bp, Artificial Sequence
  Description of Artificial Sequence: Synthetic oligonucleotide
gcagcttctcaaagctggaaagg

SEQ ID NO: 1336 - DNA, 23 bp, Artificial Sequence
  Description of Artificial Sequence: Synthetic oligonucleotide
aagctggaaaggacgagcaatgg

SEQ ID NO: 1337 - DNA, 23 bp, Artificial Sequence
  Description of Artificial Sequence: Synthetic oligonucleotide
cattcctcacagaggctgtaggg

SEQ ID NO: 1338 - DNA, 23 bp, Artificial Sequence
  Description of Artificial Sequence: Synthetic oligonucleotide
gcattcctcacagaggctgtagg

SEQ ID NO: 1339 - DNA, 23 bp, Artificial Sequence
  Description of Artificial Sequence: Synthetic oligonucleotide
tcttccctacagcctctgtgagg

SEQ ID NO: 1340 - DNA, 23 bp, Artificial Sequence
  Description of Artificial Sequence: Synthetic oligonucleotide
aaaggctgcattcctcacagagg

SEQ ID NO: 1341 - DNA, 23 bp, Artificial Sequence
  Description of Artificial Sequence: Synthetic oligonucleotide
ccttatggggttaaaatcaaagg

SEQ ID NO: 1342 - DNA, 23 bp, Artificial Sequence
  Description of Artificial Sequence: Synthetic oligonucleotide
cctttgattttaaccccataagg

SEQ ID NO: 1343 - DNA, 23 bp, Artificial Sequence
  Description of Artificial Sequence: Synthetic oligonucleotide
agtcagaaatcggccttatgggg

SEQ ID NO: 1344 - DNA, 23 bp, Artificial Sequence
  Description of Artificial Sequence: Synthetic oligonucleotide
gagtcagaaatcggccttatggg

SEQ ID NO: 1345 - DNA, 23 bp, Artificial Sequence
  Description of Artificial Sequence: Synthetic oligonucleotide
agagtcagaaatcggccttatgg

SEQ ID NO: 1346 - DNA, 23 bp, Artificial Sequence
  Description of Artificial Sequence: Synthetic oligonucleotide
cagaggctagagtcagaaatcgg

SEQ ID NO: 1347 - DNA, 23 bp, Artificial Sequence
  Description of Artificial Sequence: Synthetic oligonucleotide
cgatttctgactctagcctctgg

SEQ ID NO: 1348 - DNA, 23 bp, Artificial Sequence
  Description of Artificial Sequence: Synthetic oligonucleotide
aaattatcttacaattccagagg

SEQ ID NO: 1349 - DNA, 23 bp, Artificial Sequence
  Description of Artificial Sequence: Synthetic oligonucleotide
acaaattaccacaaatttagtgg

SEQ ID NO: 1350 - DNA, 23 bp, Artificial Sequence
  Description of Artificial Sequence: Synthetic oligonucleotide
atctcaagccactaaatttgtgg

SEQ ID NO: 1351 - DNA, 23 bp, Artificial Sequence
  Description of Artificial Sequence: Synthetic oligonucleotide
taatttgtcacagaaagcaatgg

SEQ ID NO: 1352 - DNA, 23 bp, Artificial Sequence
  Description of Artificial Sequence: Synthetic oligonucleotide
aatttgtcacagaaagcaatggg

SEQ ID NO: 1353 - DNA, 23 bp, Artificial Sequence
  Description of Artificial Sequence: Synthetic oligonucleotide
aagcaatgggaagccaacacagg

SEQ ID NO: 1354 - DNA, 23 bp, Artificial Sequence
  Description of Artificial Sequence: Synthetic oligonucleotide
tcaacaaataaggcctgtgttgg

SEQ ID NO: 1355 - DNA, 23 bp, Artificial Sequence
  Description of Artificial Sequence: Synthetic oligonucleotide
catctataagtcaacaaataagg

SEQ ID NO: 1356 - DNA, 23 bp, Artificial Sequence
  Description of Artificial Sequence: Synthetic oligonucleotide
tttcaatgtacttttatcaatgg

SEQ ID NO: 1357 - DNA, 23 bp, Artificial Sequence
  Description of Artificial Sequence: Synthetic oligonucleotide
ttttatcaatggtctcatgtagg

SEQ ID NO: 1358 - DNA, 23 bp, Artificial Sequence
  Description of Artificial Sequence: Synthetic oligonucleotide
tttatcaatggtctcatgtaggg

SEQ ID NO: 1359 - DNA, 23 bp, Artificial Sequence
  Description of Artificial Sequence: Synthetic oligonucleotide
ttaacatagtttcaactttaagg

SEQ ID NO: 1360 - DNA, 23 bp, Artificial Sequence
  Description of Artificial Sequence: Synthetic oligonucleotide
tcaactttaaggtttatatctgg

SEQ ID NO: 1361 - DNA, 23 bp, Artificial Sequence
  Description of Artificial Sequence: Synthetic oligonucleotide
gatgcttactgtttactaagtgg

SEQ ID NO: 1362 - DNA, 23 bp, Artificial Sequence
  Description of Artificial Sequence: Synthetic oligonucleotide
ctgtctcctcatctgtaaatggg

SEQ ID NO: 1363 - DNA, 23 bp, Artificial Sequence
  Description of Artificial Sequence: Synthetic oligonucleotide
cctgtctcctcatctgtaaatgg

SEQ ID NO: 1364 - DNA, 23 bp, Artificial Sequence
  Description of Artificial Sequence: Synthetic oligonucleotide
tattagcccatttacagatgagg

SEQ ID NO: 1365 - DNA, 23 bp, Artificial Sequence
  Description of Artificial Sequence: Synthetic oligonucleotide
ccatttacagatgaggagacagg

SEQ ID NO: 1366 - DNA, 23 bp, Artificial Sequence
  Description of Artificial Sequence: Synthetic oligonucleotide
caaaagacttttatgcaacctgg

SEQ ID NO: 1367 - DNA, 23 bp, Artificial Sequence
  Description of Artificial Sequence: Synthetic oligonucleotide
accagtgaatgactttgaccagg

SEQ ID NO: 1368 - DNA, 23 bp, Artificial Sequence
  Description of Artificial Sequence: Synthetic oligonucleotide
acctggtcaaagtcattcactgg

SEQ ID NO: 1369 - DNA, 23 bp, Artificial Sequence
  Description of Artificial Sequence: Synthetic oligonucleotide
agtcattcactggtaagctgagg

SEQ ID NO: 1370 - DNA, 23 bp, Artificial Sequence
  Description of Artificial Sequence: Synthetic oligonucleotide
cattcactggtaagctgaggagg

SEQ ID NO: 1371 - DNA, 23 bp, Artificial Sequence
  Description of Artificial Sequence: Synthetic oligonucleotide
ctgggggcagcaaaaggaagtgg

SEQ ID NO: 1372 - DNA, 23 bp, Artificial Sequence
  Description of Artificial Sequence: Synthetic oligonucleotide
taccccctgggggcagcaaaagg

SEQ ID NO: 1373 - DNA, 23 bp, Artificial Sequence
  Description of Artificial Sequence: Synthetic oligonucleotide
cacttccttttgctgcccccagg

SEQ ID NO: 1374 - DNA, 23 bp, Artificial Sequence
  Description of Artificial Sequence: Synthetic oligonucleotide
acttccttttgctgcccccaggg

SEQ ID NO: 1375 - DNA, 23 bp, Artificial Sequence
  Description of Artificial Sequence: Synthetic oligonucleotide
cttccttttgctgcccccagggg

SEQ ID NO: 1376 - DNA, 23 bp, Artificial Sequence
  Description of Artificial Sequence: Synthetic oligonucleotide
ttccttttgctgcccccaggggg

SEQ ID NO: 1377 - DNA, 23 bp, Artificial Sequence
  Description of Artificial Sequence: Synthetic oligonucleotide
ccaggcttgataccccctggggg

SEQ ID NO: 1378 - DNA, 23 bp, Artificial Sequence
  Description of Artificial Sequence: Synthetic oligonucleotide
gccaggcttgataccccctgggg

SEQ ID NO: 1379 - DNA, 23 bp, Artificial Sequence
  Description of Artificial Sequence: Synthetic oligonucleotide
tgccaggcttgataccccctggg

SEQ ID NO: 1380 - DNA, 23 bp, Artificial Sequence
  Description of Artificial Sequence: Synthetic oligonucleotide
ctgccaggcttgataccccctgg

SEQ ID NO: 1381 - DNA, 23 bp, Artificial Sequence
  Description of Artificial Sequence: Synthetic oligonucleotide
cccccagggggtatcaagcctgg

SEQ ID NO: 1382 - DNA, 23 bp, Artificial Sequence
  Description of Artificial Sequence: Synthetic oligonucleotide
agtcgctgacactaactgccagg

SEQ ID NO: 1383 - DNA, 23 bp, Artificial Sequence
  Description of Artificial Sequence: Synthetic oligonucleotide
gcagttagtgtcagcgacttagg

SEQ ID NO: 1384 - DNA, 23 bp, Artificial Sequence
  Description of Artificial Sequence: Synthetic oligonucleotide
gttagtgtcagcgacttaggagg

SEQ ID NO: 1385 - DNA, 23 bp, Artificial Sequence
  Description of Artificial Sequence: Synthetic oligonucleotide
taggaggtgaacaagtgagcagg

SEQ ID NO: 1386 - DNA, 23 bp, Artificial Sequence
  Description of Artificial Sequence: Synthetic oligonucleotide
gaacaagtgagcaggcctgtagg

SEQ ID NO: 1387 - DNA, 23 bp, Artificial Sequence
  Description of Artificial Sequence: Synthetic oligonucleotide
gcagtttagccaggtcctacagg

SEQ ID NO: 1388 - DNA, 23 bp, Artificial Sequence
  Description of Artificial Sequence: Synthetic oligonucleotide
gtgagcaggcctgtaggacctgg

SEQ ID NO: 1389 - DNA, 23 bp, Artificial Sequence
  Description of Artificial Sequence: Synthetic oligonucleotide
agacctggggcagtttagccagg

SEQ ID NO: 1390 - DNA, 23 bp, Artificial Sequence
  Description of Artificial Sequence: Synthetic oligonucleotide
ggacctggctaaactgccccagg

SEQ ID NO: 1391 - DNA, 23 bp, Artificial Sequence
  Description of Artificial Sequence: Synthetic oligonucleotide
aggctgtagacagagacctgggg

SEQ ID NO: 1392 - DNA, 23 bp, Artificial Sequence
  Description of Artificial Sequence: Synthetic oligonucleotide
gaggctgtagacagagacctggg

SEQ ID NO: 1393 - DNA, 23 bp, Artificial Sequence
  Description of Artificial Sequence: Synthetic oligonucleotide
tgaggctgtagacagagacctgg

SEQ ID NO: 1394 - DNA, 23 bp, Artificial Sequence
  Description of Artificial Sequence: Synthetic oligonucleotide
gacccacagccacaggtttgagg

SEQ ID NO: 1395 - DNA, 23 bp, Artificial Sequence
  Description of Artificial Sequence: Synthetic oligonucleotide
tgtctacagcctcaaacctgtgg

SEQ ID NO: 1396 - DNA, 23 bp, Artificial Sequence
  Description of Artificial Sequence: Synthetic oligonucleotide
tctctgggacccacagccacagg

SEQ ID NO: 1397 - DNA, 23 bp, Artificial Sequence
  Description of Artificial Sequence: Synthetic oligonucleotide
cagcctcaaacctgtggctgtgg

SEQ ID NO: 1398 - DNA, 23 bp, Artificial Sequence
  Description of Artificial Sequence: Synthetic oligonucleotide
agcctcaaacctgtggctgtggg

SEQ ID NO: 1399 - DNA, 23 bp, Artificial Sequence
  Description of Artificial Sequence: Synthetic oligonucleotide
gctgaggaggccttgtctctggg

SEQ ID NO: 1400 - DNA, 23 bp, Artificial Sequence
  Description of Artificial Sequence: Synthetic oligonucleotide
ggctgtgggtcccagagacaagg

SEQ ID NO: 1401 - DNA, 23 bp, Artificial Sequence
  Description of Artificial Sequence: Synthetic oligonucleotide
tgctgaggaggccttgtctctgg

SEQ ID NO: 1402 - DNA, 23 bp, Artificial Sequence
  Description of Artificial Sequence: Synthetic oligonucleotide
atccttctctgatgctgaggagg

SEQ ID NO: 1403 - DNA, 23 bp, Artificial Sequence
  Description of Artificial Sequence: Synthetic oligonucleotide
ggcatccttctctgatgctgagg

SEQ ID NO: 1404 - DNA, 23 bp, Artificial Sequence
  Description of Artificial Sequence: Synthetic oligonucleotide
ggcctcctcagcatcagagaagg

SEQ ID NO: 1405 - DNA, 23 bp, Artificial Sequence
  Description of Artificial Sequence: Synthetic oligonucleotide
ggttgatgaccctgagacaaagg

SEQ ID NO: 1406 - DNA, 23 bp, Artificial Sequence
  Description of Artificial Sequence: Synthetic oligonucleotide
gagaaggatgcctttgtctcagg

SEQ ID NO: 1407 - DNA, 23 bp, Artificial Sequence
  Description of Artificial Sequence: Synthetic oligonucleotide
agaaggatgcctttgtctcaggg

SEQ ID NO: 1408 - DNA, 23 bp, Artificial Sequence
  Description of Artificial Sequence: Synthetic oligonucleotide
cagggtcatcaaccttctccagg

SEQ ID NO: 1409 - DNA, 23 bp, Artificial Sequence
  Description of Artificial Sequence: Synthetic oligonucleotide
gggggtgagcaacctggagaagg

SEQ ID NO: 1410 - DNA, 23 bp, Artificial Sequence
  Description of Artificial Sequence: Synthetic oligonucleotide
acagcagggggtgagcaacctgg

SEQ ID NO: 1411 - DNA, 23 bp, Artificial Sequence
  Description of Artificial Sequence: Synthetic oligonucleotide
gggatcccctttacagcaggggg

SEQ ID NO: 1412 - DNA, 23 bp, Artificial Sequence
  Description of Artificial Sequence: Synthetic oligonucleotide
ggggatcccctttacagcagggg

SEQ ID NO: 1413 - DNA, 23 bp, Artificial Sequence
  Description of Artificial Sequence: Synthetic oligonucleotide
tggggatcccctttacagcaggg

SEQ ID NO: 1414 - DNA, 23 bp, Artificial Sequence
  Description of Artificial Sequence: Synthetic oligonucleotide
ttggggatcccctttacagcagg

SEQ ID NO: 1415 - DNA, 23 bp, Artificial Sequence
  Description of Artificial Sequence: Synthetic oligonucleotide
ttgctcaccccctgctgtaaagg

SEQ ID NO: 1416 - DNA, 23 bp, Artificial Sequence
  Description of Artificial Sequence: Synthetic oligonucleotide
tgctcaccccctgctgtaaaggg

SEQ ID NO: 1417 - DNA, 23 bp, Artificial Sequence
  Description of Artificial Sequence: Synthetic oligonucleotide
gctcaccccctgctgtaaagggg

SEQ ID NO: 1418 - DNA, 23 bp, Artificial Sequence
  Description of Artificial Sequence: Synthetic oligonucleotide
ttgtctgatgagcggtcttgggg

SEQ ID NO: 1419 - DNA, 23 bp, Artificial Sequence
  Description of Artificial Sequence: Synthetic oligonucleotide
cttgtctgatgagcggtcttggg

SEQ ID NO: 1420 - DNA, 23 bp, Artificial Sequence
  Description of Artificial Sequence: Synthetic oligonucleotide
ccttgtctgatgagcggtcttgg

SEQ ID NO: 1421 - DNA, 23 bp, Artificial Sequence
  Description of Artificial Sequence: Synthetic oligonucleotide
caagctccttgtctgatgagcgg

SEQ ID NO: 1422 - DNA, 23 bp, Artificial Sequence
  Description of Artificial Sequence: Synthetic oligonucleotide
ccaagaccgctcatcagacaagg

SEQ ID NO: 1423 - DNA, 23 bp, Artificial Sequence
  Description of Artificial Sequence: Synthetic oligonucleotide
cgctcatcagacaaggagcttgg

SEQ ID NO: 1424 - DNA, 23 bp, Artificial Sequence
  Description of Artificial Sequence: Synthetic oligonucleotide
gctcatcagacaaggagcttggg

SEQ ID NO: 1425 - DNA, 23 bp, Artificial Sequence
  Description of Artificial Sequence: Synthetic oligonucleotide
gacaaggagcttgggaactgagg

SEQ ID NO: 1426 - DNA, 23 bp, Artificial Sequence
  Description of Artificial Sequence: Synthetic oligonucleotide
aggagacacagtcagcctccagg

SEQ ID NO: 1427 - DNA, 23 bp, Artificial Sequence
  Description of Artificial Sequence: Synthetic oligonucleotide
ggcattttgggcactcctggagg

SEQ ID NO: 1428 - DNA, 23 bp, Artificial Sequence
  Description of Artificial Sequence: Synthetic oligonucleotide
gagggcattttgggcactcctgg

SEQ ID NO: 1429 - DNA, 23 bp, Artificial Sequence
  Description of Artificial Sequence: Synthetic oligonucleotide
gcagcatgtgagggcattttggg

SEQ ID NO: 1430 - DNA, 23 bp, Artificial Sequence
  Description of Artificial Sequence: Synthetic oligonucleotide
tgcagcatgtgagggcattttgg

SEQ ID NO: 1431 - DNA, 23 bp, Artificial Sequence
  Description of Artificial Sequence: Synthetic oligonucleotide
aatctgtatgcagcatgtgaggg

SEQ ID NO: 1432 - DNA, 23 bp, Artificial Sequence
  Description of Artificial Sequence: Synthetic oligonucleotide
caatctgtatgcagcatgtgagg

SEQ ID NO: 1433 - DNA, 23 bp, Artificial Sequence
  Description of Artificial Sequence: Synthetic oligonucleotide
atgtggatgtactttatttgtgg

SEQ ID NO: 1434 - DNA, 23 bp, Artificial Sequence
  Description of Artificial Sequence: Synthetic oligonucleotide
aggacagagtcttcagaatgtgg

SEQ ID NO: 1435 - DNA, 23 bp, Artificial Sequence
  Description of Artificial Sequence: Synthetic oligonucleotide
ggccagcctggttggtgatgagg

SEQ ID NO: 1436 - DNA, 23 bp, Artificial Sequence
  Description of Artificial Sequence: Synthetic oligonucleotide
ctctgtcctcatcaccaaccagg

SEQ ID NO: 1437 - DNA, 23 bp, Artificial Sequence
  Description of Artificial Sequence: Synthetic oligonucleotide
tcaccaggggccagcctggttgg

SEQ ID NO: 1438 - DNA, 23 bp, Artificial Sequence
  Description of Artificial Sequence: Synthetic oligonucleotide
gtcctcatcaccaaccaggctgg

SEQ ID NO: 1439 - DNA, 23 bp, Artificial Sequence
  Description of Artificial Sequence: Synthetic oligonucleotide
gccctcaccaggggccagcctgg

SEQ ID NO: 1440 - DNA, 23 bp, Artificial Sequence
  Description of Artificial Sequence: Synthetic oligonucleotide
tcaccaaccaggctggcccctgg

SEQ ID NO: 1441 - DNA, 23 bp, Artificial Sequence
  Description of Artificial Sequence: Synthetic oligonucleotide
aaccaggctggcccctggtgagg

SEQ ID NO: 1442 - DNA, 23 bp, Artificial Sequence
  Description of Artificial Sequence: Synthetic oligonucleotide
accactacagccctcaccagggg

SEQ ID NO: 1443 - DNA, 23 bp, Artificial Sequence
  Description of Artificial Sequence: Synthetic oligonucleotide
accaggctggcccctggtgaggg

SEQ ID NO: 1444 - DNA, 23 bp, Artificial Sequence
  Description of Artificial Sequence: Synthetic oligonucleotide
aaccactacagccctcaccaggg

SEQ ID NO: 1445 - DNA, 23 bp, Artificial Sequence
  Description of Artificial Sequence: Synthetic oligonucleotide
caaccactacagccctcaccagg

SEQ ID NO: 1446 - DNA, 23 bp, Artificial Sequence
  Description of Artificial Sequence: Synthetic oligonucleotide
gcccctggtgagggctgtagtgg

SEQ ID NO: 1447 - DNA, 23 bp, Artificial Sequence
  Description of Artificial Sequence: Synthetic oligonucleotide
ggtgagggctgtagtggttgagg

SEQ ID NO: 1448 - DNA, 23 bp, Artificial Sequence
  Description of Artificial Sequence: Synthetic oligonucleotide
gtagtggttgaggcctttgttgg

SEQ ID NO: 1449 - DNA, 23 bp, Artificial Sequence
  Description of Artificial Sequence: Synthetic oligonucleotide
aacctactgtctaccaacaaagg

SEQ ID NO: 1450 - DNA, 23 bp, Artificial Sequence
  Description of Artificial Sequence: Synthetic oligonucleotide
ggcctttgttggtagacagtagg

SEQ ID NO: 1451 - DNA, 23 bp, Artificial Sequence
  Description of Artificial Sequence: Synthetic oligonucleotide
agcctcccaatagaaaatcatgg

SEQ ID NO: 1452 - DNA, 23 bp, Artificial Sequence
  Description of Artificial Sequence: Synthetic oligonucleotide
agcaagccatgattttctattgg

SEQ ID NO: 1453 - DNA, 23 bp, Artificial Sequence
  Description of Artificial Sequence: Synthetic oligonucleotide
gcaagccatgattttctattggg

SEQ ID NO: 1454 - DNA, 23 bp, Artificial Sequence
  Description of Artificial Sequence: Synthetic oligonucleotide
agccatgattttctattgggagg

SEQ ID NO: 1455 - DNA, 23 bp, Artificial Sequence
  Description of Artificial Sequence: Synthetic oligonucleotide
tcagctgtgtttccaagaccagg

SEQ ID NO: 1456 - DNA, 23 bp, Artificial Sequence
  Description of Artificial Sequence: Synthetic oligonucleotide
gctttctgccctcctggtcttgg

SEQ ID NO: 1457 - DNA, 23 bp, Artificial Sequence
  Description of Artificial Sequence: Synthetic oligonucleotide
gctgtgtttccaagaccaggagg

SEQ ID NO: 1458 - DNA, 23 bp, Artificial Sequence
  Description of Artificial Sequence: Synthetic oligonucleotide
ctgtgtttccaagaccaggaggg

SEQ ID NO: 1459 - DNA, 23 bp, Artificial Sequence
  Description of Artificial Sequence: Synthetic oligonucleotide
tggtttgctttctgccctcctgg

SEQ ID NO: 1460 - DNA, 23 bp, Artificial Sequence
  Description of Artificial Sequence: Synthetic oligonucleotide
ggcagaaagcaaaccatcccagg

SEQ ID NO: 1461 - DNA, 23 bp, Artificial Sequence
  Description of Artificial Sequence: Synthetic oligonucleotide
catggactgcttgcctgggatgg

SEQ ID NO: 1462 - DNA, 23 bp, Artificial Sequence
  Description of Artificial Sequence: Synthetic oligonucleotide
ggcccatggactgcttgcctggg

SEQ ID NO: 1463 - DNA, 23 bp, Artificial Sequence
  Description of Artificial Sequence: Synthetic oligonucleotide
tggcccatggactgcttgcctgg

SEQ ID NO: 1464 - DNA, 23 bp, Artificial Sequence
  Description of Artificial Sequence: Synthetic oligonucleotide
catcccaggcaagcagtccatgg

SEQ ID NO: 1465 - DNA, 23 bp, Artificial Sequence
  Description of Artificial Sequence: Synthetic oligonucleotide
atcccaggcaagcagtccatggg

SEQ ID NO: 1466 - DNA, 23 bp, Artificial Sequence
  Description of Artificial Sequence: Synthetic oligonucleotide
tagacatctgacatggcccatgg

SEQ ID NO: 1467 - DNA, 23 bp, Artificial Sequence
  Description of Artificial Sequence: Synthetic oligonucleotide
taacgtctagacatctgacatgg

SEQ ID NO: 1468 - DNA, 23 bp, Artificial Sequence
  Description of Artificial Sequence: Synthetic oligonucleotide
tgtcagatgtctagacgttatgg

SEQ ID NO: 1469 - DNA, 23 bp, Artificial Sequence
  Description of Artificial Sequence: Synthetic oligonucleotide
gtcagatgtctagacgttatggg

SEQ ID NO: 1470 - DNA, 23 bp, Artificial Sequence
  Description of Artificial Sequence: Synthetic oligonucleotide
atcatagtttccgagaggaatgg

SEQ ID NO: 1471 - DNA, 23 bp, Artificial Sequence
  Description of Artificial Sequence: Synthetic oligonucleotide
gtttgctctgccattcctctcgg

SEQ ID NO: 1472 - DNA, 23 bp, Artificial Sequence
  Description of Artificial Sequence: Synthetic oligonucleotide
agggcatcatagtttccgagagg

SEQ ID NO: 1473 - DNA, 23 bp, Artificial Sequence
  Description of Artificial Sequence: Synthetic oligonucleotide
ggaaactatgatgccctgtatgg

SEQ ID NO: 1474 - DNA, 23 bp, Artificial Sequence
  Description of Artificial Sequence: Synthetic oligonucleotide
gactgaaggtaaaccatacaggg

SEQ ID NO: 1475 - DNA, 23 bp, Artificial Sequence
  Description of Artificial Sequence: Synthetic oligonucleotide
tgactgaaggtaaaccatacagg

SEQ ID NO: 1476 - DNA, 23 bp, Artificial Sequence
  Description of Artificial Sequence: Synthetic oligonucleotide
ggccagtcacctgtgactgaagg

SEQ ID NO: 1477 - DNA, 23 bp, Artificial Sequence
  Description of Artificial Sequence: Synthetic oligonucleotide
tatggtttaccttcagtcacagg

SEQ ID NO: 1478 - DNA, 23 bp, Artificial Sequence
  Description of Artificial Sequence: Synthetic oligonucleotide
taccttcagtcacaggtgactgg

SEQ ID NO: 1479 - DNA, 23 bp, Artificial Sequence
  Description of Artificial Sequence: Synthetic oligonucleotide
gtcacaggtgactggcctacagg

SEQ ID NO: 1480 - DNA, 23 bp, Artificial Sequence
  Description of Artificial Sequence: Synthetic oligonucleotide
tcacaggtgactggcctacaggg

SEQ ID NO: 1481 - DNA, 23 bp, Artificial Sequence
  Description of Artificial Sequence: Synthetic oligonucleotide
ggaacaaggaatggccctgtagg

SEQ ID NO: 1482 - DNA, 23 bp, Artificial Sequence
  Description of Artificial Sequence: Synthetic oligonucleotide
gaagtcgttggaacaaggaatgg

SEQ ID NO: 1483 - DNA, 23 bp, Artificial Sequence
  Description of Artificial Sequence: Synthetic oligonucleotide
ctcgagaagtcgttggaacaagg

SEQ ID NO: 1484 - DNA, 23 bp, Artificial Sequence
  Description of Artificial Sequence: Synthetic oligonucleotide
aattatactcgagaagtcgttgg

SEQ ID NO: 1485 - DNA, 23 bp, Artificial Sequence
  Description of Artificial Sequence: Synthetic oligonucleotide
ctcgagtataattaatccccagg

SEQ ID NO: 1486 - DNA, 23 bp, Artificial Sequence
  Description of Artificial Sequence: Synthetic oligonucleotide
gctctggccgtaaatgcctgggg

SEQ ID NO: 1487 - DNA, 23 bp, Artificial Sequence
  Description of Artificial Sequence: Synthetic oligonucleotide
tgctctggccgtaaatgcctggg

SEQ ID NO: 1488 - DNA, 23 bp, Artificial Sequence
  Description of Artificial Sequence: Synthetic oligonucleotide
ctgctctggccgtaaatgcctgg

SEQ ID NO: 1489 - DNA, 23 bp, Artificial Sequence
  Description of Artificial Sequence: Synthetic oligonucleotide
aattaatccccaggcatttacgg

SEQ ID NO: 1490 - DNA, 23 bp, Artificial Sequence
  Description of Artificial Sequence: Synthetic oligonucleotide
acggatttggccggctgctctgg

SEQ ID NO: 1491 - DNA, 23 bp, Artificial Sequence
  Description of Artificial Sequence: Synthetic oligonucleotide
gcatttacggccagagcagccgg

SEQ ID NO: 1492 - DNA, 23 bp, Artificial Sequence
  Description of Artificial Sequence: Synthetic oligonucleotide
ctgcacttcacggatttggccgg

SEQ ID NO: 1493 - DNA, 23 bp, Artificial Sequence
  Description of Artificial Sequence: Synthetic oligonucleotide
accactgcacttcacggatttgg

SEQ ID NO: 1494 - DNA, 23 bp, Artificial Sequence
  Description of Artificial Sequence: Synthetic oligonucleotide
aaaacaaccactgcacttcacgg

SEQ ID NO: 1495 - DNA, 23 bp, Artificial Sequence
  Description of Artificial Sequence: Synthetic oligonucleotide
gccaaatccgtgaagtgcagtgg

SEQ ID NO: 1496 - DNA, 23 bp, Artificial Sequence
  Description of Artificial Sequence: Synthetic oligonucleotide
tttaaattatattaacttcttgg

SEQ ID NO: 1497 - DNA, 23 bp, Artificial Sequence
  Description of Artificial Sequence: Synthetic oligonucleotide
acttcttggaaacttattttagg

SEQ ID NO: 1498 - DNA, 23 bp, Artificial Sequence
  Description of Artificial Sequence: Synthetic oligonucleotide
cttcttggaaacttattttaggg

SEQ ID NO: 1499 - DNA, 23 bp, Artificial Sequence
  Description of Artificial Sequence: Synthetic oligonucleotide
ctaacatttttactcaagattgg

SEQ ID NO: 1500 - DNA, 23 bp, Artificial Sequence
  Description of Artificial Sequence: Synthetic oligonucleotide
tcttgagtaaaaatgttagaagg

SEQ ID NO: 1501 - DNA, 23 bp, Artificial Sequence
  Description of Artificial Sequence: Synthetic oligonucleotide
cttgagtaaaaatgttagaaggg

SEQ ID NO: 1502 - DNA, 23 bp, Artificial Sequence
  Description of Artificial Sequence: Synthetic oligonucleotide
gtaaaaatgttagaagggactgg

SEQ ID NO: 1503 - DNA, 23 bp, Artificial Sequence
  Description of Artificial Sequence: Synthetic oligonucleotide
aaaatgttagaagggactggtgg

SEQ ID NO: 1504 - DNA, 23 bp, Artificial Sequence
  Description of Artificial Sequence: Synthetic oligonucleotide
tatgtgtagggatgtctgggagg

SEQ ID NO: 1505 - DNA, 23 bp, Artificial Sequence
  Description of Artificial Sequence: Synthetic oligonucleotide
gtctatgtgtagggatgtctggg

SEQ ID NO: 1506 - DNA, 23 bp, Artificial Sequence
  Description of Artificial Sequence: Synthetic oligonucleotide
agtctatgtgtagggatgtctgg

SEQ ID NO: 1507 - DNA, 23 bp, Artificial Sequence
  Description of Artificial Sequence: Synthetic oligonucleotide
caacccaaagtctatgtgtaggg

SEQ ID NO: 1508 - DNA, 23 bp, Artificial Sequence
  Description of Artificial Sequence: Synthetic oligonucleotide
tcaacccaaagtctatgtgtagg

SEQ ID NO: 1509 - DNA, 23 bp, Artificial Sequence
  Description of Artificial Sequence: Synthetic oligonucleotide
acatccctacacatagactttgg

SEQ ID NO: 1510 - DNA, 23 bp, Artificial Sequence
  Description of Artificial Sequence: Synthetic oligonucleotide
catccctacacatagactttggg

SEQ ID NO: 1511 - DNA, 23 bp, Artificial Sequence
  Description of Artificial Sequence: Synthetic oligonucleotide
ttagaagaaagtttcaaggaagg

SEQ ID NO: 1512 - DNA, 23 bp, Artificial Sequence
  Description of Artificial Sequence: Synthetic oligonucleotide
taatttagaagaaagtttcaagg

SEQ ID NO: 1513 - DNA, 23 bp, Artificial Sequence
  Description of Artificial Sequence: Synthetic oligonucleotide
ttgaaactttcttctaaattagg

SEQ ID NO: 1514 - DNA, 23 bp, Artificial Sequence
  Description of Artificial Sequence: Synthetic oligonucleotide
gaaggtgcctaaattagggaagg

SEQ ID NO: 1515 - DNA, 23 bp, Artificial Sequence
  Description of Artificial Sequence: Synthetic oligonucleotide
ttaggtgccttccctaatttagg

SEQ ID NO: 1516 - DNA, 23 bp, Artificial Sequence
  Description of Artificial Sequence: Synthetic oligonucleotide
ctgggaaggtgcctaaattaggg

SEQ ID NO: 1517 - DNA, 23 bp, Artificial Sequence
  Description of Artificial Sequence: Synthetic oligonucleotide
actgggaaggtgcctaaattagg

SEQ ID NO: 1518 - DNA, 23 bp, Artificial Sequence
  Description of Artificial Sequence: Synthetic oligonucleotide
gtcacagactagtactgggaagg

SEQ ID NO: 1519 - DNA, 23 bp, Artificial Sequence
  Description of Artificial Sequence: Synthetic oligonucleotide
acaggtcacagactagtactggg

SEQ ID NO: 1520 - DNA, 23 bp, Artificial Sequence
  Description of Artificial Sequence: Synthetic oligonucleotide
aacaggtcacagactagtactgg

SEQ ID NO: 1521 - DNA, 23 bp, Artificial Sequence
  Description of Artificial Sequence: Synthetic oligonucleotide
gtactagtctgtgacctgttagg

SEQ ID NO: 1522 - DNA, 23 bp, Artificial Sequence
  Description of Artificial Sequence: Synthetic oligonucleotide
tgtgtggcctggttcctaacagg

SEQ ID NO: 1523 - DNA, 23 bp, Artificial Sequence
  Description of Artificial Sequence: Synthetic oligonucleotide
tctgtgacctgttaggaaccagg

SEQ ID NO: 1524 - DNA, 23 bp, Artificial Sequence
  Description of Artificial Sequence: Synthetic oligonucleotide
tcaactcctgctgtgtggcctgg

SEQ ID NO: 1525 - DNA, 23 bp, Artificial Sequence
  Description of Artificial Sequence: Synthetic oligonucleotide
taggaaccaggccacacagcagg

SEQ ID NO: 1526 - DNA, 23 bp, Artificial Sequence
  Description of Artificial Sequence: Synthetic oligonucleotide
gccactcaactcctgctgtgtgg

SEQ ID NO: 1527 - DNA, 23 bp, Artificial Sequence
  Description of Artificial Sequence: Synthetic oligonucleotide
gccacacagcaggagttgagtgg

SEQ ID NO: 1528 - DNA, 23 bp, Artificial Sequence
  Description of Artificial Sequence: Synthetic oligonucleotide
cacagcaggagttgagtggcagg

SEQ ID NO: 1529 - DNA, 23 bp, Artificial Sequence
  Description of Artificial Sequence: Synthetic oligonucleotide
acagcaggagttgagtggcaggg

SEQ ID NO: 1530 - DNA, 23 bp, Artificial Sequence
  Description of Artificial Sequence: Synthetic oligonucleotide
tctgacaggaggcggagctcagg

SEQ ID NO: 1531 - DNA, 23 bp, Artificial Sequence
  Description of Artificial Sequence: Synthetic oligonucleotide
actgctgatctgacaggaggcgg

SEQ ID NO: 1532 - DNA, 23 bp, Artificial Sequence
  Description of Artificial Sequence: Synthetic oligonucleotide
gccactgctgatctgacaggagg

SEQ ID NO: 1533 - DNA, 23 bp, Artificial Sequence
  Description of Artificial Sequence: Synthetic oligonucleotide
aatgccactgctgatctgacagg

SEQ ID NO: 1534 - DNA, 23 bp, Artificial Sequence
  Description of Artificial Sequence: Synthetic oligonucleotide
gcctcctgtcagatcagcagtgg

SEQ ID NO: 1535 - DNA, 23 bp, Artificial Sequence
  Description of Artificial Sequence: Synthetic oligonucleotide
gcacagttcacaatagtattcgg

SEQ ID NO: 1536 - DNA, 23 bp, Artificial Sequence
  Description of Artificial Sequence: Synthetic oligonucleotide
tattgtgaactgtgcgtgtaagg

SEQ ID NO: 1537 - DNA, 23 bp, Artificial Sequence
  Description of Artificial Sequence: Synthetic oligonucleotide
attgtgaactgtgcgtgtaaggg

SEQ ID NO: 1538 - DNA, 23 bp, Artificial Sequence
  Description of Artificial Sequence: Synthetic oligonucleotide
tcgggcattagattctcataagg

SEQ ID NO: 1539 - DNA, 23 bp, Artificial Sequence
  Description of Artificial Sequence: Synthetic oligonucleotide
tatgagaatctaatgcccgatgg

SEQ ID NO: 1540 - DNA, 23 bp, Artificial Sequence
  Description of Artificial Sequence: Synthetic oligonucleotide
ctcttccatctcagaccatcggg

SEQ ID NO: 1541 - DNA, 23 bp, Artificial Sequence
  Description of Artificial Sequence: Synthetic oligonucleotide
actcttccatctcagaccatcgg

SEQ ID NO: 1542 - DNA, 23 bp, Artificial Sequence
  Description of Artificial Sequence: Synthetic oligonucleotide
taatgcccgatggtctgagatgg

SEQ ID NO: 1543 - DNA, 23 bp, Artificial Sequence
  Description of Artificial Sequence: Synthetic oligonucleotide
gcagggggaaggggtggttttgg

SEQ ID NO: 1544 - DNA, 23 bp, Artificial Sequence
  Description of Artificial Sequence: Synthetic oligonucleotide
atggtggcagggggaaggggtgg

SEQ ID NO: 1545 - DNA, 23 bp, Artificial Sequence
  Description of Artificial Sequence: Synthetic oligonucleotide
cagatggtggcagggggaagggg

SEQ ID NO: 1546 - DNA, 23 bp, Artificial Sequence
  Description of Artificial Sequence: Synthetic oligonucleotide
ccagatggtggcagggggaaggg

SEQ ID NO: 1547 - DNA, 23 bp, Artificial Sequence
  Description of Artificial Sequence: Synthetic oligonucleotide
cccagatggtggcagggggaagg

SEQ ID NO: 1548 - DNA, 23 bp, Artificial Sequence
  Description of Artificial Sequence: Synthetic oligonucleotide
tttccccagatggtggcaggggg

SEQ ID NO: 1549 - DNA, 23 bp, Artificial Sequence
  Description of Artificial Sequence: Synthetic oligonucleotide
atttccccagatggtggcagggg

SEQ ID NO: 1550 - DNA, 23 bp, Artificial Sequence
  Description of Artificial Sequence: Synthetic oligonucleotide
tatttccccagatggtggcaggg

SEQ ID NO: 1551 - DNA, 23 bp, Artificial Sequence
  Description of Artificial Sequence: Synthetic oligonucleotide
atatttccccagatggtggcagg

SEQ ID NO: 1552 - DNA, 23 bp, Artificial Sequence
  Description of Artificial Sequence: Synthetic oligonucleotide
cccttccccctgccaccatctgg

SEQ ID NO: 1553 - DNA, 23 bp, Artificial Sequence
  Description of Artificial Sequence: Synthetic oligonucleotide
ccttccccctgccaccatctggg

SEQ ID NO: 1554 - DNA, 23 bp, Artificial Sequence
  Description of Artificial Sequence: Synthetic oligonucleotide
gacaatatttccccagatggtgg

SEQ ID NO: 1555 - DNA, 23 bp, Artificial Sequence
  Description of Artificial Sequence: Synthetic oligonucleotide
cttccccctgccaccatctgggg

SEQ ID NO: 1556 - DNA, 23 bp, Artificial Sequence
  Description of Artificial Sequence: Synthetic oligonucleotide
gtagacaatatttccccagatgg

SEQ ID NO: 1557 - DNA, 23 bp, Artificial Sequence
  Description of Artificial Sequence: Synthetic oligonucleotide
ggcaccagggatcagtttcgtgg

SEQ ID NO: 1558 - DNA, 23 bp, Artificial Sequence
  Description of Artificial Sequence: Synthetic oligonucleotide
tctaccacgaaactgatccctgg

SEQ ID NO: 1559 - DNA, 23 bp, Artificial Sequence
  Description of Artificial Sequence: Synthetic oligonucleotide
ccccaacctttttggcaccaggg

SEQ ID NO: 1560 - DNA, 23 bp, Artificial Sequence
  Description of Artificial Sequence: Synthetic oligonucleotide
tccccaacctttttggcaccagg

SEQ ID NO: 1561 - DNA, 23 bp, Artificial Sequence
  Description of Artificial Sequence: Synthetic oligonucleotide
actgatccctggtgccaaaaagg

SEQ ID NO: 1562 - DNA, 23 bp, Artificial Sequence
  Description of Artificial Sequence: Synthetic oligonucleotide
acagcggtccccaacctttttgg

SEQ ID NO: 1563 - DNA, 23 bp, Artificial Sequence
  Description of Artificial Sequence: Synthetic oligonucleotide
atccctggtgccaaaaaggttgg

SEQ ID NO: 1564 - DNA, 23 bp, Artificial Sequence
  Description of Artificial Sequence: Synthetic oligonucleotide
tccctggtgccaaaaaggttggg

SEQ ID NO: 1565 - DNA, 23 bp, Artificial Sequence
  Description of Artificial Sequence: Synthetic oligonucleotide
ccctggtgccaaaaaggttgggg

SEQ ID NO: 1566 - DNA, 23 bp, Artificial Sequence
  Description of Artificial Sequence: Synthetic oligonucleotide
aagcagatcccttaggacagcgg

SEQ ID NO: 1567 - DNA, 23 bp, Artificial Sequence
  Description of Artificial Sequence: Synthetic oligonucleotide
ggttggggaccgctgtcctaagg

SEQ ID NO: 1568 - DNA, 23 bp, Artificial Sequence
  Description of Artificial Sequence: Synthetic oligonucleotide
gttggggaccgctgtcctaaggg

SEQ ID NO: 1569 - DNA, 23 bp, Artificial Sequence
  Description of Artificial Sequence: Synthetic oligonucleotide
tcagaaaaagcagatcccttagg

SEQ ID NO: 1570 - DNA, 23 bp, Artificial Sequence
  Description of Artificial Sequence: Synthetic oligonucleotide
gatctgctttttctgacctgagg

SEQ ID NO: 1571 - DNA, 23 bp, Artificial Sequence
  Description of Artificial Sequence: Synthetic oligonucleotide
gtctaataaagaaaaacctcagg

SEQ ID NO: 1572 - DNA, 23 bp, Artificial Sequence
  Description of Artificial Sequence: Synthetic oligonucleotide
tttctttattagactgtatctgg

SEQ ID NO: 1573 - DNA, 23 bp, Artificial Sequence
  Description of Artificial Sequence: Synthetic oligonucleotide
tattagactgtatctggctgagg

SEQ ID NO: 1574 - DNA, 23 bp, Artificial Sequence
  Description of Artificial Sequence: Synthetic oligonucleotide
ctgttccgattaaaggcttcagg

SEQ ID NO: 1575 - DNA, 23 bp, Artificial Sequence
  Description of Artificial Sequence: Synthetic oligonucleotide
agaagcctgaagcctttaatcgg

SEQ ID NO: 1576 - DNA, 23 bp, Artificial Sequence
  Description of Artificial Sequence: Synthetic oligonucleotide
gccaaagctgttccgattaaagg

SEQ ID NO: 1577 - DNA, 23 bp, Artificial Sequence
  Description of Artificial Sequence: Synthetic oligonucleotide
gcctttaatcggaacagctttgg

SEQ ID NO: 1578 - DNA, 23 bp, Artificial Sequence
  Description of Artificial Sequence: Synthetic oligonucleotide
agattcagaaaccaacagattgg

SEQ ID NO: 1579 - DNA, 23 bp, Artificial Sequence
  Description of Artificial Sequence: Synthetic oligonucleotide
catagaaaagaccaatctgttgg

SEQ ID NO: 1580 - DNA, 23 bp, Artificial Sequence
  Description of Artificial Sequence: Synthetic oligonucleotide
cagattggtcttttctatgcagg

SEQ ID NO: 1581 - DNA, 23 bp, Artificial Sequence
  Description of Artificial Sequence: Synthetic oligonucleotide
agattggtcttttctatgcaggg

SEQ ID NO: 1582 - DNA, 23 bp, Artificial Sequence
  Description of Artificial Sequence: Synthetic oligonucleotide
ttttctatgcagggaagcctagg

SEQ ID NO: 1583 - DNA, 23 bp, Artificial Sequence
  Description of Artificial Sequence: Synthetic oligonucleotide
atgcagggaagcctaggaactgg

SEQ ID NO: 1584 - DNA, 23 bp, Artificial Sequence
  Description of Artificial Sequence: Synthetic oligonucleotide
gccatagccccccagttcctagg

SEQ ID NO: 1585 - DNA, 23 bp, Artificial Sequence
  Description of Artificial Sequence: Synthetic oligonucleotide
tgcagggaagcctaggaactggg

SEQ ID NO: 1586 - DNA, 23 bp, Artificial Sequence
  Description of Artificial Sequence: Synthetic oligonucleotide
gcagggaagcctaggaactgggg

SEQ ID NO: 1587 - DNA, 23 bp, Artificial Sequence
  Description of Artificial Sequence: Synthetic oligonucleotide
cagggaagcctaggaactggggg

SEQ ID NO: 1588 - DNA, 23 bp, Artificial Sequence
  Description of Artificial Sequence: Synthetic oligonucleotide
agggaagcctaggaactgggggg

SEQ ID NO: 1589 - DNA, 23 bp, Artificial Sequence
  Description of Artificial Sequence: Synthetic oligonucleotide
gcctaggaactggggggctatgg

SEQ ID NO: 1590 - DNA, 23 bp, Artificial Sequence
  Description of Artificial Sequence: Synthetic oligonucleotide
aggaactggggggctatggctgg

SEQ ID NO: 1591 - DNA, 23 bp, Artificial Sequence
  Description of Artificial Sequence: Synthetic oligonucleotide
ggaactggggggctatggctggg

SEQ ID NO: 1592 - DNA, 23 bp, Artificial Sequence
  Description of Artificial Sequence: Synthetic oligonucleotide
gaaaggatggaaacaataggggg

SEQ ID NO: 1593 - DNA, 23 bp, Artificial Sequence
  Description of Artificial Sequence: Synthetic oligonucleotide
ggaaaggatggaaacaatagggg

SEQ ID NO: 1594 - DNA, 23 bp, Artificial Sequence
  Description of Artificial Sequence: Synthetic oligonucleotide
aggaaaggatggaaacaataggg

SEQ ID NO: 1595 - DNA, 23 bp, Artificial Sequence
  Description of Artificial Sequence: Synthetic oligonucleotide
taggaaaggatggaaacaatagg

SEQ ID NO: 1596 - DNA, 23 bp, Artificial Sequence
  Description of Artificial Sequence: Synthetic oligonucleotide
aggatgaacataggaaaggatgg

SEQ ID NO: 1597 - DNA, 23 bp, Artificial Sequence
  Description of Artificial Sequence: Synthetic oligonucleotide
ctccaggatgaacataggaaagg

SEQ ID NO: 1598 - DNA, 23 bp, Artificial Sequence
  Description of Artificial Sequence: Synthetic oligonucleotide
cattcctccaggatgaacatagg

SEQ ID NO: 1599 - DNA, 23 bp, Artificial Sequence
  Description of Artificial Sequence: Synthetic oligonucleotide
atcctttcctatgttcatcctgg

SEQ ID NO: 1600 - DNA, 23 bp, Artificial Sequence
  Description of Artificial Sequence: Synthetic oligonucleotide
ctttcctatgttcatcctggagg

SEQ ID NO: 1601 - DNA, 23 bp, Artificial Sequence
  Description of Artificial Sequence: Synthetic oligonucleotide
gggtctgatgccattcctccagg

SEQ ID NO: 1602 - DNA, 23 bp, Artificial Sequence
  Description of Artificial Sequence: Synthetic oligonucleotide
ctatgttcatcctggaggaatgg

SEQ ID NO: 1603 - DNA, 23 bp, Artificial Sequence
  Description of Artificial Sequence: Synthetic oligonucleotide
gggagcaatcacagaggcatggg

SEQ ID NO: 1604 - DNA, 23 bp, Artificial Sequence
  Description of Artificial Sequence: Synthetic oligonucleotide
tgggagcaatcacagaggcatgg

SEQ ID NO: 1605 - DNA, 23 bp, Artificial Sequence
  Description of Artificial Sequence: Synthetic oligonucleotide
tgggctgggagcaatcacagagg

SEQ ID NO: 1606 - DNA, 23 bp, Artificial Sequence
  Description of Artificial Sequence: Synthetic oligonucleotide
atgctgtggttggatgggctggg

SEQ ID NO: 1607 - DNA, 23 bp, Artificial Sequence
  Description of Artificial Sequence: Synthetic oligonucleotide
gatgctgtggttggatgggctgg

SEQ ID NO: 1608 - DNA, 23 bp, Artificial Sequence
  Description of Artificial Sequence: Synthetic oligonucleotide
catagatgctgtggttggatggg

SEQ ID NO: 1609 - DNA, 23 bp, Artificial Sequence
  Description of Artificial Sequence: Synthetic oligonucleotide
acatagatgctgtggttggatgg

SEQ ID NO: 1610 - DNA, 23 bp, Artificial Sequence
  Description of Artificial Sequence: Synthetic oligonucleotide
cagaacatagatgctgtggttgg

SEQ ID NO: 1611 - DNA, 23 bp, Artificial Sequence
  Description of Artificial Sequence: Synthetic oligonucleotide
caggcagaacatagatgctgtgg

SEQ ID NO: 1612 - DNA, 23 bp, Artificial Sequence
  Description of Artificial Sequence: Synthetic oligonucleotide
cacagcatctatgttctgcctgg

SEQ ID NO: 1613 - DNA, 23 bp, Artificial Sequence
  Description of Artificial Sequence: Synthetic oligonucleotide
acagcatctatgttctgcctggg

SEQ ID NO: 1614 - DNA, 23 bp, Artificial Sequence
  Description of Artificial Sequence: Synthetic oligonucleotide
tctatgttctgcctgggaccagg

SEQ ID NO: 1615 - DNA, 23 bp, Artificial Sequence
  Description of Artificial Sequence: Synthetic oligonucleotide
tgctccctggccctggtcccagg

SEQ ID NO: 1616 - DNA, 23 bp, Artificial Sequence
  Description of Artificial Sequence: Synthetic oligonucleotide
ctatgttctgcctgggaccaggg

SEQ ID NO: 1617 - DNA, 23 bp, Artificial Sequence
  Description of Artificial Sequence: Synthetic oligonucleotide
ttctgcctgggaccagggccagg

SEQ ID NO: 1618 - DNA, 23 bp, Artificial Sequence
  Description of Artificial Sequence: Synthetic oligonucleotide
tctgcctgggaccagggccaggg

SEQ ID NO: 1619 - DNA, 23 bp, Artificial Sequence
  Description of Artificial Sequence: Synthetic oligonucleotide
tgtgccatgctccctggccctgg

SEQ ID NO: 1620 - DNA, 23 bp, Artificial Sequence
  Description of Artificial Sequence: Synthetic oligonucleotide
gctcagtgtgccatgctccctgg

SEQ ID NO: 1621 - DNA, 23 bp, Artificial Sequence
  Description of Artificial Sequence: Synthetic oligonucleotide
gggaccagggccagggagcatgg

SEQ ID NO: 1622 - DNA, 23 bp, Artificial Sequence
  Description of Artificial Sequence: Synthetic oligonucleotide
ggcacactgagctgagtataagg

SEQ ID NO: 1623 - DNA, 23 bp, Artificial Sequence
  Description of Artificial Sequence: Synthetic oligonucleotide
tgagctgagtataaggagagtgg

SEQ ID NO: 1624 - DNA, 23 bp, Artificial Sequence
  Description of Artificial Sequence: Synthetic oligonucleotide
gagtataaggagagtggagcagg

SEQ ID NO: 1625 - DNA, 23 bp, Artificial Sequence
  Description of Artificial Sequence: Synthetic oligonucleotide
aaaattttctgggctggcagtgg

SEQ ID NO: 1626 - DNA, 23 bp, Artificial Sequence
  Description of Artificial Sequence: Synthetic oligonucleotide
ttgaccaaaattttctgggctgg

SEQ ID NO: 1627 - DNA, 23 bp, Artificial Sequence
  Description of Artificial Sequence: Synthetic oligonucleotide
aactttgaccaaaattttctggg

SEQ ID NO: 1628 - DNA, 23 bp, Artificial Sequence
  Description of Artificial Sequence: Synthetic oligonucleotide
caactttgaccaaaattttctgg

SEQ ID NO: 1629 - DNA, 23 bp, Artificial Sequence
  Description of Artificial Sequence: Synthetic oligonucleotide
actgccagcccagaaaattttgg

SEQ ID NO: 1630 - DNA, 23 bp, Artificial Sequence
  Description of Artificial Sequence: Synthetic oligonucleotide
tcgaaggctgagaagatttcagg

SEQ ID NO: 1631 - DNA, 23 bp, Artificial Sequence
  Description of Artificial Sequence: Synthetic oligonucleotide
agagagcagctgtgaatcgaagg

SEQ ID NO: 1632 - DNA, 23 bp, Artificial Sequence
  Description of Artificial Sequence: Synthetic oligonucleotide
ggctgggaaggtgtcaaagctgg

SEQ ID NO: 1633 - DNA, 23 bp, Artificial Sequence
  Description of Artificial Sequence: Synthetic oligonucleotide
cagcagcctgtgggctgggaagg

SEQ ID NO: 1634 - DNA, 23 bp, Artificial Sequence
  Description of Artificial Sequence: Synthetic oligonucleotide
agtgcagcagcctgtgggctggg

SEQ ID NO: 1635 - DNA, 23 bp, Artificial Sequence
  Description of Artificial Sequence: Synthetic oligonucleotide
ttgacaccttcccagcccacagg

SEQ ID NO: 1636 - DNA, 23 bp, Artificial Sequence
  Description of Artificial Sequence: Synthetic oligonucleotide
cagtgcagcagcctgtgggctgg

SEQ ID NO: 1637 - DNA, 23 bp, Artificial Sequence
  Description of Artificial Sequence: Synthetic oligonucleotide
gccccagtgcagcagcctgtggg

SEQ ID NO: 1638 - DNA, 23 bp, Artificial Sequence
  Description of Artificial Sequence: Synthetic oligonucleotide
agccccagtgcagcagcctgtgg

SEQ ID NO: 1639 - DNA, 23 bp, Artificial Sequence
  Description of Artificial Sequence: Synthetic oligonucleotide
cagcccacaggctgctgcactgg

SEQ ID NO: 1640 - DNA, 23 bp, Artificial Sequence
  Description of Artificial Sequence: Synthetic oligonucleotide
agcccacaggctgctgcactggg

SEQ ID NO: 1641 - DNA, 23 bp, Artificial Sequence
  Description of Artificial Sequence: Synthetic oligonucleotide
gcccacaggctgctgcactgggg

SEQ ID NO: 1642 - DNA, 23 bp, Artificial Sequence
  Description of Artificial Sequence: Synthetic oligonucleotide
ggctgctgcactggggctgaagg

SEQ ID NO: 1643 - DNA, 23 bp, Artificial Sequence
  Description of Artificial Sequence: Synthetic oligonucleotide
ctgcactggggctgaaggcgtgg

SEQ ID NO: 1644 - DNA, 23 bp, Artificial Sequence
  Description of Artificial Sequence: Synthetic oligonucleotide
gtcactctctaggtgtgcagggg

SEQ ID NO: 1645 - DNA, 23 bp, Artificial Sequence
  Description of Artificial Sequence: Synthetic oligonucleotide
tgtcactctctaggtgtgcaggg

SEQ ID NO: 1646 - DNA, 23 bp, Artificial Sequence
  Description of Artificial Sequence: Synthetic oligonucleotide
ctgtcactctctaggtgtgcagg

SEQ ID NO: 1647 - DNA, 23 bp, Artificial Sequence
  Description of Artificial Sequence: Synthetic oligonucleotide
tggcatctctgtcactctctagg

SEQ ID NO: 1648 - DNA, 23 bp, Artificial Sequence
  Description of Artificial Sequence: Synthetic oligonucleotide
gagtgacagagatgccagactgg

SEQ ID NO: 1649 - DNA, 23 bp, Artificial Sequence
  Description of Artificial Sequence: Synthetic oligonucleotide
agtgacagagatgccagactggg

SEQ ID NO: 1650 - DNA, 23 bp, Artificial Sequence
  Description of Artificial Sequence: Synthetic oligonucleotide
tgccttcctgctgcccagtctgg

SEQ ID NO: 1651 - DNA, 23 bp, Artificial Sequence
  Description of Artificial Sequence: Synthetic oligonucleotide
gagatgccagactgggcagcagg

SEQ ID NO: 1652 - DNA, 23 bp, Artificial Sequence
  Description of Artificial Sequence: Synthetic oligonucleotide
tgccagactgggcagcaggaagg

SEQ ID NO: 1653 - DNA, 23 bp, Artificial Sequence
  Description of Artificial Sequence: Synthetic oligonucleotide
ctgggcagcaggaaggcaagagg

SEQ ID NO: 1654 - DNA, 23 bp, Artificial Sequence
  Description of Artificial Sequence: Synthetic oligonucleotide
aggattaagagagagcttcctgg

SEQ ID NO: 1655 - DNA, 23 bp, Artificial Sequence
  Description of Artificial Sequence: Synthetic oligonucleotide
accgagtgtggctttcagccagg

SEQ ID NO: 1656 - DNA, 23 bp, Artificial Sequence
  Description of Artificial Sequence: Synthetic oligonucleotide
tcctggctgaaagccacactcgg

SEQ ID NO: 1657 - DNA, 23 bp, Artificial Sequence
  Description of Artificial Sequence: Synthetic oligonucleotide
ttttcctggttaaccgagtgtgg

SEQ ID NO: 1658 - DNA, 23 bp, Artificial Sequence
  Description of Artificial Sequence: Synthetic oligonucleotide
aaagccacactcggttaaccagg

SEQ ID NO: 1659 - DNA, 23 bp, Artificial Sequence
  Description of Artificial Sequence: Synthetic oligonucleotide
tcgtgccaagggctttttcctgg

SEQ ID NO: 1660 - DNA, 23 bp, Artificial Sequence
  Description of Artificial Sequence: Synthetic oligonucleotide
gttaaccaggaaaaagcccttgg

SEQ ID NO: 1661 - DNA, 23 bp, Artificial Sequence
  Description of Artificial Sequence: Synthetic oligonucleotide
actgagtcttctcgtgccaaggg

SEQ ID NO: 1662 - DNA, 23 bp, Artificial Sequence
  Description of Artificial Sequence: Synthetic oligonucleotide
cactgagtcttctcgtgccaagg

SEQ ID NO: 1663 - DNA, 23 bp, Artificial Sequence
  Description of Artificial Sequence: Synthetic oligonucleotide
cttggcacgagaagactcagtgg

SEQ ID NO: 1664 - DNA, 23 bp, Artificial Sequence
  Description of Artificial Sequence: Synthetic oligonucleotide
cgagaagactcagtggcctgagg

SEQ ID NO: 1665 - DNA, 23 bp, Artificial Sequence
  Description of Artificial Sequence: Synthetic oligonucleotide
gagaagactcagtggcctgaggg

SEQ ID NO: 1666 - DNA, 23 bp, Artificial Sequence
  Description of Artificial Sequence: Synthetic oligonucleotide
caaccaaggctcagtccctcagg

SEQ ID NO: 1667 - DNA, 23 bp, Artificial Sequence
  Description of Artificial Sequence: Synthetic oligonucleotide
tggcctgagggactgagccttgg

SEQ ID NO: 1668 - DNA, 23 bp, Artificial Sequence
  Description of Artificial Sequence: Synthetic oligonucleotide
cagcacatgcccaacaaccaagg

SEQ ID NO: 1669 - DNA, 23 bp, Artificial Sequence
  Description of Artificial Sequence: Synthetic oligonucleotide
agggactgagccttggttgttgg

SEQ ID NO: 1670 - DNA, 23 bp, Artificial Sequence
  Description of Artificial Sequence: Synthetic oligonucleotide
gggactgagccttggttgttggg

SEQ ID NO: 1671 - DNA, 23 bp, Artificial Sequence
  Description of Artificial Sequence: Synthetic oligonucleotide
actctactgtcacacatggatgg

SEQ ID NO: 1672 - DNA, 23 bp, Artificial Sequence
  Description of Artificial Sequence: Synthetic oligonucleotide
ctacactctactgtcacacatgg

SEQ ID NO: 1673 - DNA, 23 bp, Artificial Sequence
  Description of Artificial Sequence: Synthetic oligonucleotide
cacccatgtcccacagtggctgg

SEQ ID NO: 1674 - DNA, 23 bp, Artificial Sequence
  Description of Artificial Sequence: Synthetic oligonucleotide
agagtgtagtccagccactgtgg

SEQ ID NO: 1675 - DNA, 23 bp, Artificial Sequence
  Description of Artificial Sequence: Synthetic oligonucleotide
gagtgtagtccagccactgtggg

SEQ ID NO: 1676 - DNA, 23 bp, Artificial Sequence
  Description of Artificial Sequence: Synthetic oligonucleotide
tcagcacccatgtcccacagtgg

SEQ ID NO: 1677 - DNA, 23 bp, Artificial Sequence
  Description of Artificial Sequence: Synthetic oligonucleotide
agtccagccactgtgggacatgg

SEQ ID NO: 1678 - DNA, 23 bp, Artificial Sequence
  Description of Artificial Sequence: Synthetic oligonucleotide
gtccagccactgtgggacatggg

SEQ ID NO: 1679 - DNA, 23 bp, Artificial Sequence
  Description of Artificial Sequence: Synthetic oligonucleotide
atgggtgctgaaagaccacatgg

SEQ ID NO: 1680 - DNA, 23 bp, Artificial Sequence
  Description of Artificial Sequence: Synthetic oligonucleotide
actcactgttcctctccatgtgg

SEQ ID NO: 1681 - DNA, 23 bp, Artificial Sequence
  Description of Artificial Sequence: Synthetic oligonucleotide
tgctgaaagaccacatggagagg

SEQ ID NO: 1682 - DNA, 23 bp, Artificial Sequence
  Description of Artificial Sequence: Synthetic oligonucleotide
aggaacagtgagtgctgacaagg

SEQ ID NO: 1683 - DNA, 23 bp, Artificial Sequence
  Description of Artificial Sequence: Synthetic oligonucleotide
ggaacagtgagtgctgacaaggg

SEQ ID NO: 1684 - DNA, 23 bp, Artificial Sequence
  Description of Artificial Sequence: Synthetic oligonucleotide
gggtgtctccaaagtgatcaagg

SEQ ID NO: 1685 - DNA, 23 bp, Artificial Sequence
  Description of Artificial Sequence: Synthetic oligonucleotide
agggctagccttgatcactttgg

SEQ ID NO: 1686 - DNA, 23 bp, Artificial Sequence
  Description of Artificial Sequence: Synthetic oligonucleotide
tgacatctagaagacacaggggg

SEQ ID NO: 1687 - DNA, 23 bp, Artificial Sequence
  Description of Artificial Sequence: Synthetic oligonucleotide
ctgacatctagaagacacagggg

SEQ ID NO: 1688 - DNA, 23 bp, Artificial Sequence
  Description of Artificial Sequence: Synthetic oligonucleotide
tctgacatctagaagacacaggg

SEQ ID NO: 1689 - DNA, 23 bp, Artificial Sequence
  Description of Artificial Sequence: Synthetic oligonucleotide
gtctgacatctagaagacacagg

SEQ ID NO: 1690 - DNA, 23 bp, Artificial Sequence
  Description of Artificial Sequence: Synthetic oligonucleotide
tggaggatagcagacagatttgg

SEQ ID NO: 1691 - DNA, 23 bp, Artificial Sequence
  Description of Artificial Sequence: Synthetic oligonucleotide
tcttgaaaatgcacgtttggagg

SEQ ID NO: 1692 - DNA, 23 bp, Artificial Sequence
  Description of Artificial Sequence: Synthetic oligonucleotide
tgctcttgaaaatgcacgtttgg

SEQ ID NO: 1693 - DNA, 23 bp, Artificial Sequence
  Description of Artificial Sequence: Synthetic oligonucleotide
acgtgcattttcaagagcaatgg

SEQ ID NO: 1694 - DNA, 23 bp, Artificial Sequence
  Description of Artificial Sequence: Synthetic oligonucleotide
ttttcaagagcaatggaaaaagg

SEQ ID NO: 1695 - DNA, 23 bp, Artificial Sequence
  Description of Artificial Sequence: Synthetic oligonucleotide
aagagcaatggaaaaaggattgg

SEQ ID NO: 1696 - DNA, 23 bp, Artificial Sequence
  Description of Artificial Sequence: Synthetic oligonucleotide
ggaaaaaggattggacttgatgg

SEQ ID NO: 1697 - DNA, 23 bp, Artificial Sequence
  Description of Artificial Sequence: Synthetic oligonucleotide
tggaatgcagcaagagtcctagg

SEQ ID NO: 1698 - DNA, 23 bp, Artificial Sequence
  Description of Artificial Sequence: Synthetic oligonucleotide
aggtaggtagtaacagacctagg

SEQ ID NO: 1699 - DNA, 23 bp, Artificial Sequence
  Description of Artificial Sequence: Synthetic oligonucleotide
agtttcttaaggtcataggtagg

SEQ ID NO: 1700 - DNA, 23 bp, Artificial Sequence
  Description of Artificial Sequence: Synthetic oligonucleotide
aaggagtttcttaaggtcatagg

SEQ ID NO: 1701 - DNA, 23 bp, Artificial Sequence
  Description of Artificial Sequence: Synthetic oligonucleotide
aggggtgaaggagtttcttaagg

SEQ ID NO: 1702 - DNA, 23 bp, Artificial Sequence
  Description of Artificial Sequence: Synthetic oligonucleotide
gtaagggttctgaggggtgaagg

SEQ ID NO: 1703 - DNA, 23 bp, Artificial Sequence
  Description of Artificial Sequence: Synthetic oligonucleotide
aaagctgtaagggttctgagggg

SEQ ID NO: 1704 - DNA, 23 bp, Artificial Sequence
  Description of Artificial Sequence: Synthetic oligonucleotide
gaaagctgtaagggttctgaggg

SEQ ID NO: 1705 - DNA, 23 bp, Artificial Sequence
  Description of Artificial Sequence: Synthetic oligonucleotide
agaaagctgtaagggttctgagg

SEQ ID NO: 1706 - DNA, 23 bp, Artificial Sequence
  Description of Artificial Sequence: Synthetic oligonucleotide
aatcagaaagaaagctgtaaggg

SEQ ID NO: 1707 - DNA, 23 bp, Artificial Sequence
  Description of Artificial Sequence: Synthetic oligonucleotide
gaatcagaaagaaagctgtaagg

SEQ ID NO: 1708 - DNA, 23 bp, Artificial Sequence
  Description of Artificial Sequence: Synthetic oligonucleotide
agcttggagtagagtaactcagg

SEQ ID NO: 1709 - DNA, 23 bp, Artificial Sequence
  Description of Artificial Sequence: Synthetic oligonucleotide
taagcagaaaagtctcagcttgg

SEQ ID NO: 1710 - DNA, 23 bp, Artificial Sequence
  Description of Artificial Sequence: Synthetic oligonucleotide
ggttgggggtttaggaggaaggg

SEQ ID NO: 1711 - DNA, 23 bp, Artificial Sequence
  Description of Artificial Sequence: Synthetic oligonucleotide
aggttgggggtttaggaggaagg

SEQ ID NO: 1712 - DNA, 23 bp, Artificial Sequence
  Description of Artificial Sequence: Synthetic oligonucleotide
atggaggttgggggtttaggagg

SEQ ID NO: 1713 - DNA, 23 bp, Artificial Sequence
  Description of Artificial Sequence: Synthetic oligonucleotide
gaaatggaggttgggggtttagg

SEQ ID NO: 1714 - DNA, 23 bp, Artificial Sequence
  Description of Artificial Sequence: Synthetic oligonucleotide
ccaggagaaatggaggttggggg

SEQ ID NO: 1715 - DNA, 23 bp, Artificial Sequence
  Description of Artificial Sequence: Synthetic oligonucleotide
accaggagaaatggaggttgggg

SEQ ID NO: 1716 - DNA, 23 bp, Artificial Sequence
  Description of Artificial Sequence: Synthetic oligonucleotide
caccaggagaaatggaggttggg

SEQ ID NO: 1717 - DNA, 23 bp, Artificial Sequence
  Description of Artificial Sequence: Synthetic oligonucleotide
acaccaggagaaatggaggttgg

SEQ ID NO: 1718 - DNA, 23 bp, Artificial Sequence
  Description of Artificial Sequence: Synthetic oligonucleotide
aaagacaccaggagaaatggagg

SEQ ID NO: 1719 - DNA, 23 bp, Artificial Sequence
  Description of Artificial Sequence: Synthetic oligonucleotide
aagaaagacaccaggagaaatgg

SEQ ID NO: 1720 - DNA, 23 bp, Artificial Sequence
  Description of Artificial Sequence: Synthetic oligonucleotide
cccccaacctccatttctcctgg

SEQ ID NO: 1721 - DNA, 23 bp, Artificial Sequence
  Description of Artificial Sequence: Synthetic oligonucleotide
ggtgtgtaaagaaagacaccagg

SEQ ID NO: 1722 - DNA, 23 bp, Artificial Sequence
  Description of Artificial Sequence: Synthetic oligonucleotide
aggtgtgtgtgtatgctgagggg

SEQ ID NO: 1723 - DNA, 23 bp, Artificial Sequence
  Description of Artificial Sequence: Synthetic oligonucleotide
taggtgtgtgtgtatgctgaggg

SEQ ID NO: 1724 - DNA, 23 bp, Artificial Sequence
  Description of Artificial Sequence: Synthetic oligonucleotide
ctaggtgtgtgtgtatgctgagg

SEQ ID NO: 1725 - DNA, 23 bp, Artificial Sequence
  Description of Artificial Sequence: Synthetic oligonucleotide
atacacacacacctagccacagg

SEQ ID NO: 1726 - DNA, 23 bp, Artificial Sequence
  Description of Artificial Sequence: Synthetic oligonucleotide
actcattggttcctgtggctagg

SEQ ID NO: 1727 - DNA, 23 bp, Artificial Sequence
  Description of Artificial Sequence: Synthetic oligonucleotide
tattaactcattggttcctgtgg

SEQ ID NO: 1728 - DNA, 23 bp, Artificial Sequence
  Description of Artificial Sequence: Synthetic oligonucleotide
ctcctcaaatattaactcattgg

SEQ ID NO: 1729 - DNA, 23 bp, Artificial Sequence
  Description of Artificial Sequence: Synthetic oligonucleotide
aaccaatgagttaatatttgagg

SEQ ID NO: 1730 - DNA, 23 bp, Artificial Sequence
  Description of Artificial Sequence: Synthetic oligonucleotide
tgagttaatatttgaggagttgg

SEQ ID NO: 1731 - DNA, 23 bp, Artificial Sequence
  Description of Artificial Sequence: Synthetic oligonucleotide
gcctcaccaggatctcattgagg

SEQ ID NO: 1732 - DNA, 23 bp, Artificial Sequence
  Description of Artificial Sequence: Synthetic oligonucleotide
ttttgtcctcaatgagatcctgg

SEQ ID NO: 1733 - DNA, 23 bp, Artificial Sequence
  Description of Artificial Sequence: Synthetic oligonucleotide
tcctcaatgagatcctggtgagg

SEQ ID NO: 1734 - DNA, 23 bp, Artificial Sequence
  Description of Artificial Sequence: Synthetic oligonucleotide
acagctcaagtggcctcaccagg

SEQ ID NO: 1735 - DNA, 23 bp, Artificial Sequence
  Description of Artificial Sequence: Synthetic oligonucleotide
agggagctgaacagctcaagtgg

SEQ ID NO: 1736 - DNA, 23 bp, Artificial Sequence
  Description of Artificial Sequence: Synthetic oligonucleotide
tgagctgttcagctcccttgcgg

SEQ ID NO: 1737 - DNA, 23 bp, Artificial Sequence
  Description of Artificial Sequence: Synthetic oligonucleotide
ccatccccaaaataccgcaaggg

SEQ ID NO: 1738 - DNA, 23 bp, Artificial Sequence
  Description of Artificial Sequence: Synthetic oligonucleotide
tccatccccaaaataccgcaagg

SEQ ID NO: 1739 - DNA, 23 bp, Artificial Sequence
  Description of Artificial Sequence: Synthetic oligonucleotide
tcagctcccttgcggtattttgg

SEQ ID NO: 1740 - DNA, 23 bp, Artificial Sequence
  Description of Artificial Sequence: Synthetic oligonucleotide
cagctcccttgcggtattttggg

SEQ ID NO: 1741 - DNA, 23 bp, Artificial Sequence
  Description of Artificial Sequence: Synthetic oligonucleotide
agctcccttgcggtattttgggg

SEQ ID NO: 1742 - DNA, 23 bp, Artificial Sequence
  Description of Artificial Sequence: Synthetic oligonucleotide
cccttgcggtattttggggatgg

SEQ ID NO: 1743 - DNA, 23 bp, Artificial Sequence
  Description of Artificial Sequence: Synthetic oligonucleotide
agactctttttctatattgttgg

SEQ ID NO: 1744 - DNA, 23 bp, Artificial Sequence
  Description of Artificial Sequence: Synthetic oligonucleotide
caatatagaaaaagagtctttgg

SEQ ID NO: 1745 - DNA, 23 bp, Artificial Sequence
  Description of Artificial Sequence: Synthetic oligonucleotide
catggagcccctgggaaagctgg

SEQ ID NO: 1746 - DNA, 23 bp, Artificial Sequence
  Description of Artificial Sequence: Synthetic oligonucleotide
agtctttggccagctttcccagg

SEQ ID NO: 1747 - DNA, 23 bp, Artificial Sequence
  Description of Artificial Sequence: Synthetic oligonucleotide
gtctttggccagctttcccaggg

SEQ ID NO: 1748 - DNA, 23 bp, Artificial Sequence
  Description of Artificial Sequence: Synthetic oligonucleotide
tctttggccagctttcccagggg

SEQ ID NO: 1749 - DNA, 23 bp, Artificial Sequence
  Description of Artificial Sequence: Synthetic oligonucleotide
ctctatggcatggagcccctggg

SEQ ID NO: 1750 - DNA, 23 bp, Artificial Sequence
  Description of Artificial Sequence: Synthetic oligonucleotide
tctctatggcatggagcccctgg

SEQ ID NO: 1751 - DNA, 23 bp, Artificial Sequence
  Description of Artificial Sequence: Synthetic oligonucleotide
gtgcagtactctctatggcatgg

SEQ ID NO: 1752 - DNA, 23 bp, Artificial Sequence
  Description of Artificial Sequence: Synthetic oligonucleotide
cacgggtgcagtactctctatgg

SEQ ID NO: 1753 - DNA, 23 bp, Artificial Sequence
  Description of Artificial Sequence: Synthetic oligonucleotide
tcagggccccctgtgcacacggg

SEQ ID NO: 1754 - DNA, 23 bp, Artificial Sequence
  Description of Artificial Sequence: Synthetic oligonucleotide
gtcagggccccctgtgcacacgg

SEQ ID NO: 1755 - DNA, 23 bp, Artificial Sequence
  Description of Artificial Sequence: Synthetic oligonucleotide
agtactgcacccgtgtgcacagg

SEQ ID NO: 1756 - DNA, 23 bp, Artificial Sequence
  Description of Artificial Sequence: Synthetic oligonucleotide
gtactgcacccgtgtgcacaggg

SEQ ID NO: 1757 - DNA, 23 bp, Artificial Sequence
  Description of Artificial Sequence: Synthetic oligonucleotide
tactgcacccgtgtgcacagggg

SEQ ID NO: 1758 - DNA, 23 bp, Artificial Sequence
  Description of Artificial Sequence: Synthetic oligonucleotide
actgcacccgtgtgcacaggggg

SEQ ID NO: 1759 - DNA, 23 bp, Artificial Sequence
  Description of Artificial Sequence: Synthetic oligonucleotide
tcctcaaagtcctcatgtcaggg

SEQ ID NO: 1760 - DNA, 23 bp, Artificial Sequence
  Description of Artificial Sequence: Synthetic oligonucleotide
gcacagggggccctgacatgagg

SEQ ID NO: 1761 - DNA, 23 bp, Artificial Sequence
  Description of Artificial Sequence: Synthetic oligonucleotide
atcctcaaagtcctcatgtcagg

SEQ ID NO: 1762 - DNA, 23 bp, Artificial Sequence
  Description of Artificial Sequence: Synthetic oligonucleotide
gccctgacatgaggactttgagg

SEQ ID NO: 1763 - DNA, 23 bp, Artificial Sequence
  Description of Artificial Sequence: Synthetic oligonucleotide
agatgctgaagcagagttggagg

SEQ ID NO: 1764 - DNA, 23 bp, Artificial Sequence
  Description of Artificial Sequence: Synthetic oligonucleotide
tggagatgctgaagcagagttgg

SEQ ID NO: 1765 - DNA, 23 bp, Artificial Sequence
  Description of Artificial Sequence: Synthetic oligonucleotide
actctgcttcagcatctccatgg

SEQ ID NO: 1766 - DNA, 23 bp, Artificial Sequence
  Description of Artificial Sequence: Synthetic oligonucleotide
agtgtctgtgtgaaaatccatgg

SEQ ID NO: 1767 - DNA, 23 bp, Artificial Sequence
  Description of Artificial Sequence: Synthetic oligonucleotide
gattttcacacagacactttagg

SEQ ID NO: 1768 - DNA, 23 bp, Artificial Sequence
  Description of Artificial Sequence: Synthetic oligonucleotide
tttaggaaagaaactaagtttgg

SEQ ID NO: 1769 - DNA, 23 bp, Artificial Sequence
  Description of Artificial Sequence: Synthetic oligonucleotide
ttaggaaagaaactaagtttggg

SEQ ID NO: 1770 - DNA, 23 bp, Artificial Sequence
  Description of Artificial Sequence: Synthetic oligonucleotide
taggaaagaaactaagtttgggg

SEQ ID NO: 1771 - DNA, 23 bp, Artificial Sequence
  Description of Artificial Sequence: Synthetic oligonucleotide
aggaaagaaactaagtttggggg

SEQ ID NO: 1772 - DNA, 23 bp, Artificial Sequence
  Description of Artificial Sequence: Synthetic oligonucleotide
ggaaagaaactaagtttgggggg

SEQ ID NO: 1773 - DNA, 23 bp, Artificial Sequence
  Description of Artificial Sequence: Synthetic oligonucleotide
tggggctgtgatgtgggattagg

SEQ ID NO: 1774 - DNA, 23 bp, Artificial Sequence
  Description of Artificial Sequence: Synthetic oligonucleotide
tattactggggctgtgatgtggg

SEQ ID NO: 1775 - DNA, 23 bp, Artificial Sequence
  Description of Artificial Sequence: Synthetic oligonucleotide
gtattactggggctgtgatgtgg

SEQ ID NO: 1776 - DNA, 23 bp, Artificial Sequence
  Description of Artificial Sequence: Synthetic oligonucleotide
attccagggctgtattactgggg

SEQ ID NO: 1777 - DNA, 23 bp, Artificial Sequence
  Description of Artificial Sequence: Synthetic oligonucleotide
aattccagggctgtattactggg

SEQ ID NO: 1778 - DNA, 23 bp, Artificial Sequence
  Description of Artificial Sequence: Synthetic oligonucleotide
aaattccagggctgtattactgg

SEQ ID NO: 1779 - DNA, 23 bp, Artificial Sequence
  Description of Artificial Sequence: Synthetic oligonucleotide
cagccccagtaatacagccctgg

SEQ ID NO: 1780 - DNA, 23 bp, Artificial Sequence
  Description of Artificial Sequence: Synthetic oligonucleotide
gctttctgtgataaattccaggg

SEQ ID NO: 1781 - DNA, 23 bp, Artificial Sequence
  Description of Artificial Sequence: Synthetic oligonucleotide
ggctttctgtgataaattccagg

SEQ ID NO: 1782 - DNA, 23 bp, Artificial Sequence
  Description of Artificial Sequence: Synthetic oligonucleotide
tgggatatgcatgggattctagg

SEQ ID NO: 1783 - DNA, 23 bp, Artificial Sequence
  Description of Artificial Sequence: Synthetic oligonucleotide
catatgcatgggatatgcatggg

SEQ ID NO: 1784 - DNA, 23 bp, Artificial Sequence
  Description of Artificial Sequence: Synthetic oligonucleotide
gcatatgcatgggatatgcatgg

SEQ ID NO: 1785 - DNA, 23 bp, Artificial Sequence
  Description of Artificial Sequence: Synthetic oligonucleotide
gactagggatgcatatgcatggg

SEQ ID NO: 1786 - DNA, 23 bp, Artificial Sequence
  Description of Artificial Sequence: Synthetic oligonucleotide
ggactagggatgcatatgcatgg

SEQ ID NO: 1787 - DNA, 23 bp, Artificial Sequence
  Description of Artificial Sequence: Synthetic oligonucleotide
gccttgaacccataggactaggg

SEQ ID NO: 1788 - DNA, 23 bp, Artificial Sequence
  Description of Artificial Sequence: Synthetic oligonucleotide
agccttgaacccataggactagg

SEQ ID NO: 1789 - DNA, 23 bp, Artificial Sequence
  Description of Artificial Sequence: Synthetic oligonucleotide
catatgcatccctagtcctatgg

SEQ ID NO: 1790 - DNA, 23 bp, Artificial Sequence
  Description of Artificial Sequence: Synthetic oligonucleotide
atatgcatccctagtcctatggg

SEQ ID NO: 1791 - DNA, 23 bp, Artificial Sequence
  Description of Artificial Sequence: Synthetic oligonucleotide
gctccaagccttgaacccatagg

SEQ ID NO: 1792 - DNA, 23 bp, Artificial Sequence
  Description of Artificial Sequence: Synthetic oligonucleotide
tccctagtcctatgggttcaagg

SEQ ID NO: 1793 - DNA, 23 bp, Artificial Sequence
  Description of Artificial Sequence: Synthetic oligonucleotide
agtcctatgggttcaaggcttgg

SEQ ID NO: 1794 - DNA, 23 bp, Artificial Sequence
  Description of Artificial Sequence: Synthetic oligonucleotide
tcaaggcttggagctctccctgg

SEQ ID NO: 1795 - DNA, 23 bp, Artificial Sequence
  Description of Artificial Sequence: Synthetic oligonucleotide
acttttcccagctaaatccaggg

SEQ ID NO: 1796 - DNA, 23 bp, Artificial Sequence
  Description of Artificial Sequence: Synthetic oligonucleotide
aacttttcccagctaaatccagg

SEQ ID NO: 1797 - DNA, 23 bp, Artificial Sequence
  Description of Artificial Sequence: Synthetic oligonucleotide
gagctctccctggatttagctgg

SEQ ID NO: 1798 - DNA, 23 bp, Artificial Sequence
  Description of Artificial Sequence: Synthetic oligonucleotide
agctctccctggatttagctggg

SEQ ID NO: 1799 - DNA, 23 bp, Artificial Sequence
  Description of Artificial Sequence: Synthetic oligonucleotide
tggatttagctgggaaaagttgg

SEQ ID NO: 1800 - DNA, 23 bp, Artificial Sequence
  Description of Artificial Sequence: Synthetic oligonucleotide
ttctctgtcttctagaaatatgg

SEQ ID NO: 1801 - DNA, 23 bp, Artificial Sequence
  Description of Artificial Sequence: Synthetic oligonucleotide
gtttcttggtctatgaaatgggg

SEQ ID NO: 1802 - DNA, 23 bp, Artificial Sequence
  Description of Artificial Sequence: Synthetic oligonucleotide
agtttcttggtctatgaaatggg

SEQ ID NO: 1803 - DNA, 23 bp, Artificial Sequence
  Description of Artificial Sequence: Synthetic oligonucleotide
cagtttcttggtctatgaaatgg

SEQ ID NO: 1804 - DNA, 23 bp, Artificial Sequence
  Description of Artificial Sequence: Synthetic oligonucleotide
tctctctggtctcagtttcttgg

SEQ ID NO: 1805 - DNA, 23 bp, Artificial Sequence
  Description of Artificial Sequence: Synthetic oligonucleotide
tgaaagtccatttctctctctgg

SEQ ID NO: 1806 - DNA, 23 bp, Artificial Sequence
  Description of Artificial Sequence: Synthetic oligonucleotide
actgagaccagagagagaaatgg

SEQ ID NO: 1807 - DNA, 23 bp, Artificial Sequence
  Description of Artificial Sequence: Synthetic oligonucleotide
tgatccatcagtaactagcaggg

SEQ ID NO: 1808 - DNA, 23 bp, Artificial Sequence
  Description of Artificial Sequence: Synthetic oligonucleotide
gtgatccatcagtaactagcagg

SEQ ID NO: 1809 - DNA, 23 bp, Artificial Sequence
  Description of Artificial Sequence: Synthetic oligonucleotide
ttcaccctgctagttactgatgg

SEQ ID NO: 1810 - DNA, 23 bp, Artificial Sequence
  Description of Artificial Sequence: Synthetic oligonucleotide
agagaaacagtgctagaatcagg

SEQ ID NO: 1811 - DNA, 23 bp, Artificial Sequence
  Description of Artificial Sequence: Synthetic oligonucleotide
acacactttcaaaggtggtgtgg

SEQ ID NO: 1812 - DNA, 23 bp, Artificial Sequence
  Description of Artificial Sequence: Synthetic oligonucleotide
gattgacacactttcaaaggtgg

SEQ ID NO: 1813 - DNA, 23 bp, Artificial Sequence
  Description of Artificial Sequence: Synthetic oligonucleotide
tttgattgacacactttcaaagg

SEQ ID NO: 1814 - DNA, 23 bp, Artificial Sequence
  Description of Artificial Sequence: Synthetic oligonucleotide
aaatcttactttagttgcagagg

SEQ ID NO: 1815 - DNA, 23 bp, Artificial Sequence
  Description of Artificial Sequence: Synthetic oligonucleotide
gctaaacaggctattgtcttggg

SEQ ID NO: 1816 - DNA, 23 bp, Artificial Sequence
  Description of Artificial Sequence: Synthetic oligonucleotide
ggctaaacaggctattgtcttgg

SEQ ID NO: 1817 - DNA, 23 bp, Artificial Sequence
  Description of Artificial Sequence: Synthetic oligonucleotide
tgaacttataagggctaaacagg

SEQ ID NO: 1818 - DNA, 23 bp, Artificial Sequence
  Description of Artificial Sequence: Synthetic oligonucleotide
tttcatccctgaacttataaggg

SEQ ID NO: 1819 - DNA, 23 bp, Artificial Sequence
  Description of Artificial Sequence: Synthetic oligonucleotide
ctttcatccctgaacttataagg

SEQ ID NO: 1820 - DNA, 23 bp, Artificial Sequence
  Description of Artificial Sequence: Synthetic oligonucleotide
tgtttagcccttataagttcagg

SEQ ID NO: 1821 - DNA, 23 bp, Artificial Sequence
  Description of Artificial Sequence: Synthetic oligonucleotide
gtttagcccttataagttcaggg

SEQ ID NO: 1822 - DNA, 23 bp, Artificial Sequence
  Description of Artificial Sequence: Synthetic oligonucleotide
cttataagttcagggatgaaagg

SEQ ID NO: 1823 - DNA, 23 bp, Artificial Sequence
  Description of Artificial Sequence: Synthetic oligonucleotide
atgaaaggttagaaagaaacagg

SEQ ID NO: 1824 - DNA, 23 bp, Artificial Sequence
  Description of Artificial Sequence: Synthetic oligonucleotide
aaggttagaaagaaacaggatgg

SEQ ID NO: 1825 - DNA, 23 bp, Artificial Sequence
  Description of Artificial Sequence: Synthetic oligonucleotide
ttagaaagaaacaggatggaagg

SEQ ID NO: 1826 - DNA, 23 bp, Artificial Sequence
  Description of Artificial Sequence: Synthetic oligonucleotide
gaaagaaacaggatggaaggagg

SEQ ID NO: 1827 - DNA, 23 bp, Artificial Sequence
  Description of Artificial Sequence: Synthetic oligonucleotide
aaacaggatggaaggaggactgg

SEQ ID NO: 1828 - DNA, 23 bp, Artificial Sequence
  Description of Artificial Sequence: Synthetic oligonucleotide
actggagaaaaaaacaaaagagg

SEQ ID NO: 1829 - DNA, 23 bp, Artificial Sequence
  Description of Artificial Sequence: Synthetic oligonucleotide
gagaaaaaaacaaaagaggaagg

SEQ ID NO: 1830 - DNA, 23 bp, Artificial Sequence
  Description of Artificial Sequence: Synthetic oligonucleotide
aaaaaacaaaagaggaaggaagg

SEQ ID NO: 1831 - DNA, 23 bp, Artificial Sequence
  Description of Artificial Sequence: Synthetic oligonucleotide
aaacaaaagaggaaggaaggagg

SEQ ID NO: 1832 - DNA, 23 bp, Artificial Sequence
  Description of Artificial Sequence: Synthetic oligonucleotide
caaaagaggaaggaaggaggagg

SEQ ID NO: 1833 - DNA, 23 bp, Artificial Sequence
  Description of Artificial Sequence: Synthetic oligonucleotide
ggaaggaggaggaagcaaacagg

SEQ ID NO: 1834 - DNA, 23 bp, Artificial Sequence
  Description of Artificial Sequence: Synthetic oligonucleotide
gggctcccaggaaatgactgagg

SEQ ID NO: 1835 - DNA, 23 bp, Artificial Sequence
  Description of Artificial Sequence: Synthetic oligonucleotide
gtcactcctcagtcatttcctgg

SEQ ID NO: 1836 - DNA, 23 bp, Artificial Sequence
  Description of Artificial Sequence: Synthetic oligonucleotide
tcactcctcagtcatttcctggg

SEQ ID NO: 1837 - DNA, 23 bp, Artificial Sequence
  Description of Artificial Sequence: Synthetic oligonucleotide
tttgctagaaatgggctcccagg

SEQ ID NO: 1838 - DNA, 23 bp, Artificial Sequence
  Description of Artificial Sequence: Synthetic oligonucleotide
gctgtcactttgctagaaatggg

SEQ ID NO: 1839 - DNA, 23 bp, Artificial Sequence
  Description of Artificial Sequence: Synthetic oligonucleotide
agctgtcactttgctagaaatgg

SEQ ID NO: 1840 - DNA, 23 bp, Artificial Sequence
  Description of Artificial Sequence: Synthetic oligonucleotide
aagtgacagctgcaactccctgg

SEQ ID NO: 1841 - DNA, 23 bp, Artificial Sequence
  Description of Artificial Sequence: Synthetic oligonucleotide
ctaagatgctcaggtggccaggg

SEQ ID NO: 1842 - DNA, 23 bp, Artificial Sequence
  Description of Artificial Sequence: Synthetic oligonucleotide
gctaagatgctcaggtggccagg

SEQ ID NO: 1843 - DNA, 23 bp, Artificial Sequence
  Description of Artificial Sequence: Synthetic oligonucleotide
gatcagctaagatgctcaggtgg

SEQ ID NO: 1844 - DNA, 23 bp, Artificial Sequence
  Description of Artificial Sequence: Synthetic oligonucleotide
acagatcagctaagatgctcagg

SEQ ID NO: 1845 - DNA, 23 bp, Artificial Sequence
  Description of Artificial Sequence: Synthetic oligonucleotide
tctgtctctgaaacaccccctgg

SEQ ID NO: 1846 - DNA, 23 bp, Artificial Sequence
  Description of Artificial Sequence: Synthetic oligonucleotide
tgattcatctgttctccaggggg

SEQ ID NO: 1847 - DNA, 23 bp, Artificial Sequence
  Description of Artificial Sequence: Synthetic oligonucleotide
ctgattcatctgttctccagggg

SEQ ID NO: 1848 - DNA, 23 bp, Artificial Sequence
  Description of Artificial Sequence: Synthetic oligonucleotide
cctgattcatctgttctccaggg

SEQ ID NO: 1849 - DNA, 23 bp, Artificial Sequence
  Description of Artificial Sequence: Synthetic oligonucleotide
gcctgattcatctgttctccagg

SEQ ID NO: 1850 - DNA, 23 bp, Artificial Sequence
  Description of Artificial Sequence: Synthetic oligonucleotide
ccctggagaacagatgaatcagg

SEQ ID NO: 1851 - DNA, 23 bp, Artificial Sequence
  Description of Artificial Sequence: Synthetic oligonucleotide
atttaaatggagtcgtctcaggg

SEQ ID NO: 1852 - DNA, 23 bp, Artificial Sequence
  Description of Artificial Sequence: Synthetic oligonucleotide
catttaaatggagtcgtctcagg

SEQ ID NO: 1853 - DNA, 23 bp, Artificial Sequence
  Description of Artificial Sequence: Synthetic oligonucleotide
cctgctcttgttcatttaaatgg

SEQ ID NO: 1854 - DNA, 23 bp, Artificial Sequence
  Description of Artificial Sequence: Synthetic oligonucleotide
ccatttaaatgaacaagagcagg

SEQ ID NO: 1855 - DNA, 23 bp, Artificial Sequence
  Description of Artificial Sequence: Synthetic oligonucleotide
tgaacaagagcaggatttcctgg

SEQ ID NO: 1856 - DNA, 23 bp, Artificial Sequence
  Description of Artificial Sequence: Synthetic oligonucleotide
gaacaagagcaggatttcctggg

SEQ ID NO: 1857 - DNA, 23 bp, Artificial Sequence
  Description of Artificial Sequence: Synthetic oligonucleotide
aaggtgctctcagtgtgcccagg

SEQ ID NO: 1858 - DNA, 23 bp, Artificial Sequence
  Description of Artificial Sequence: Synthetic oligonucleotide
acactgagagcaccttccagagg

SEQ ID NO: 1859 - DNA, 23 bp, Artificial Sequence
  Description of Artificial Sequence: Synthetic oligonucleotide
gctctggaggggcctctggaagg

SEQ ID NO: 1860 - DNA, 23 bp, Artificial Sequence
  Description of Artificial Sequence: Synthetic oligonucleotide
tagggctctggaggggcctctgg

SEQ ID NO: 1861 - DNA, 23 bp, Artificial Sequence
  Description of Artificial Sequence: Synthetic oligonucleotide
caggctttagggctctggagggg

SEQ ID NO: 1862 - DNA, 23 bp, Artificial Sequence
  Description of Artificial Sequence: Synthetic oligonucleotide
acaggctttagggctctggaggg

SEQ ID NO: 1863 - DNA, 23 bp, Artificial Sequence
  Description of Artificial Sequence: Synthetic oligonucleotide
tacaggctttagggctctggagg

SEQ ID NO: 1864 - DNA, 23 bp, Artificial Sequence
  Description of Artificial Sequence: Synthetic oligonucleotide
aaatacaggctttagggctctgg

SEQ ID NO: 1865 - DNA, 23 bp, Artificial Sequence
  Description of Artificial Sequence: Synthetic oligonucleotide
tggaagaaatacaggctttaggg

SEQ ID NO: 1866 - DNA, 23 bp, Artificial Sequence
  Description of Artificial Sequence: Synthetic oligonucleotide
ctggaagaaatacaggctttagg

SEQ ID NO: 1867 - DNA, 23 bp, Artificial Sequence
  Description of Artificial Sequence: Synthetic oligonucleotide
aggccgactggaagaaatacagg

SEQ ID NO: 1868 - DNA, 23 bp, Artificial Sequence
  Description of Artificial Sequence: Synthetic oligonucleotide
aagcctgtatttcttccagtcgg

SEQ ID NO: 1869 - DNA, 23 bp, Artificial Sequence
  Description of Artificial Sequence: Synthetic oligonucleotide
caggaaagaaacaggccgactgg

SEQ ID NO: 1870 - DNA, 23 bp, Artificial Sequence
  Description of Artificial Sequence: Synthetic oligonucleotide
gacatcaccaggaaagaaacagg

SEQ ID NO: 1871 - DNA, 23 bp, Artificial Sequence
  Description of Artificial Sequence: Synthetic oligonucleotide
cagtcggcctgtttctttcctgg

SEQ ID NO: 1872 - DNA, 23 bp, Artificial Sequence
  Description of Artificial Sequence: Synthetic oligonucleotide
gggcgtttaatgacatcaccagg

SEQ ID NO: 1873 - DNA, 23 bp, Artificial Sequence
  Description of Artificial Sequence: Synthetic oligonucleotide
ctcactgtgggactctcaaaggg

SEQ ID NO: 1874 - DNA, 23 bp, Artificial Sequence
  Description of Artificial Sequence: Synthetic oligonucleotide
gctcactgtgggactctcaaagg

SEQ ID NO: 1875 - DNA, 23 bp, Artificial Sequence
  Description of Artificial Sequence: Synthetic oligonucleotide
accgcagaactgctcactgtggg

SEQ ID NO: 1876 - DNA, 23 bp, Artificial Sequence
  Description of Artificial Sequence: Synthetic oligonucleotide
taccgcagaactgctcactgtgg

SEQ ID NO: 1877 - DNA, 23 bp, Artificial Sequence
  Description of Artificial Sequence: Synthetic oligonucleotide
tcccacagtgagcagttctgcgg

SEQ ID NO: 1878 - DNA, 23 bp, Artificial Sequence
  Description of Artificial Sequence: Synthetic oligonucleotide
actcagactttaattgcagcggg

SEQ ID NO: 1879 - DNA, 23 bp, Artificial Sequence
  Description of Artificial Sequence: Synthetic oligonucleotide
gactcagactttaattgcagcgg

SEQ ID NO: 1880 - DNA, 23 bp, Artificial Sequence
  Description of Artificial Sequence: Synthetic oligonucleotide
tatgccctttgagacaggaaagg

SEQ ID NO: 1881 - DNA, 23 bp, Artificial Sequence
  Description of Artificial Sequence: Synthetic oligonucleotide
atgaatatgccctttgagacagg

SEQ ID NO: 1882 - DNA, 23 bp, Artificial Sequence
  Description of Artificial Sequence: Synthetic oligonucleotide
tgagtcctttcctgtctcaaagg

SEQ ID NO: 1883 - DNA, 23 bp, Artificial Sequence
  Description of Artificial Sequence: Synthetic oligonucleotide
gagtcctttcctgtctcaaaggg

SEQ ID NO: 1884 - DNA, 23 bp, Artificial Sequence
  Description of Artificial Sequence: Synthetic oligonucleotide
ggcatattcatatagaagaaagg

SEQ ID NO: 1885 - DNA, 23 bp, Artificial Sequence
  Description of Artificial Sequence: Synthetic oligonucleotide
ttcatatagaagaaaggaaaagg

SEQ ID NO: 1886 - DNA, 23 bp, Artificial Sequence
  Description of Artificial Sequence: Synthetic oligonucleotide
tatagaagaaaggaaaaggaagg

SEQ ID NO: 1887 - DNA, 23 bp, Artificial Sequence
  Description of Artificial Sequence: Synthetic oligonucleotide
aagaaaggaaaaggaaggactgg

SEQ ID NO: 1888 - DNA, 23 bp, Artificial Sequence
  Description of Artificial Sequence: Synthetic oligonucleotide
aaggactggctgtttgcatttgg

SEQ ID NO: 1889 - DNA, 23 bp, Artificial Sequence
  Description of Artificial Sequence: Synthetic oligonucleotide
ggctgtttgcatttggttccagg

SEQ ID NO: 1890 - DNA, 23 bp, Artificial Sequence
  Description of Artificial Sequence: Synthetic oligonucleotide
cgacctctactcaacaggcctgg

SEQ ID NO: 1891 - DNA, 23 bp, Artificial Sequence
  Description of Artificial Sequence: Synthetic oligonucleotide
gagcacgacctctactcaacagg

SEQ ID NO: 1892 - DNA, 23 bp, Artificial Sequence
  Description of Artificial Sequence: Synthetic oligonucleotide
gttccaggcctgttgagtagagg

SEQ ID NO: 1893 - DNA, 23 bp, Artificial Sequence
  Description of Artificial Sequence: Synthetic oligonucleotide
ggtcgtgctcactccaccgaagg

SEQ ID NO: 1894 - DNA, 23 bp, Artificial Sequence
  Description of Artificial Sequence: Synthetic oligonucleotide
aggctaccctgtaccttcggtgg

SEQ ID NO: 1895 - DNA, 23 bp, Artificial Sequence
  Description of Artificial Sequence: Synthetic oligonucleotide
tgaaggctaccctgtaccttcgg

SEQ ID NO: 1896 - DNA, 23 bp, Artificial Sequence
  Description of Artificial Sequence: Synthetic oligonucleotide
gctcactccaccgaaggtacagg

SEQ ID NO: 1897 - DNA, 23 bp, Artificial Sequence
  Description of Artificial Sequence: Synthetic oligonucleotide
ctcactccaccgaaggtacaggg

SEQ ID NO: 1898 - DNA, 23 bp, Artificial Sequence
  Description of Artificial Sequence: Synthetic oligonucleotide
aaatccccaggttctgctgaagg

SEQ ID NO: 1899 - DNA, 23 bp, Artificial Sequence
  Description of Artificial Sequence: Synthetic oligonucleotide
gggtagccttcagcagaacctgg

SEQ ID NO: 1900 - DNA, 23 bp, Artificial Sequence
  Description of Artificial Sequence: Synthetic oligonucleotide
ggtagccttcagcagaacctggg

SEQ ID NO: 1901 - DNA, 23 bp, Artificial Sequence
  Description of Artificial Sequence: Synthetic oligonucleotide
gtagccttcagcagaacctgggg

SEQ ID NO: 1902 - DNA, 23 bp, Artificial Sequence
  Description of Artificial Sequence: Synthetic oligonucleotide
ttgcttaaaaccaaatccccagg

SEQ ID NO: 1903 - DNA, 23 bp, Artificial Sequence
  Description of Artificial Sequence: Synthetic oligonucleotide
ttcagcagaacctggggatttgg

SEQ ID NO: 1904 - DNA, 23 bp, Artificial Sequence
  Description of Artificial Sequence: Synthetic oligonucleotide
gttttaagcaagtctttcttagg

SEQ ID NO: 1905 - DNA, 23 bp, Artificial Sequence
  Description of Artificial Sequence: Synthetic oligonucleotide
aagcaagtctttcttaggtgtgg

SEQ ID NO: 1906 - DNA, 23 bp, Artificial Sequence
  Description of Artificial Sequence: Synthetic oligonucleotide
agcaagtctttcttaggtgtggg

SEQ ID NO: 1907 - DNA, 23 bp, Artificial Sequence
  Description of Artificial Sequence: Synthetic oligonucleotide
ttcaaataatattgcaaggaagg

SEQ ID NO: 1908 - DNA, 23 bp, Artificial Sequence
  Description of Artificial Sequence: Synthetic oligonucleotide
gaatttcaaataatattgcaagg

SEQ ID NO: 1909 - DNA, 23 bp, Artificial Sequence
  Description of Artificial Sequence: Synthetic oligonucleotide
acgaaccaatattctggggacgg

SEQ ID NO: 1910 - DNA, 23 bp, Artificial Sequence
  Description of Artificial Sequence: Synthetic oligonucleotide
tttaacgaaccaatattctgggg

SEQ ID NO: 1911 - DNA, 23 bp, Artificial Sequence
  Description of Artificial Sequence: Synthetic oligonucleotide
ctttaacgaaccaatattctggg

SEQ ID NO: 1912 - DNA, 23 bp, Artificial Sequence
  Description of Artificial Sequence: Synthetic oligonucleotide
tttagccgtccccagaatattgg

SEQ ID NO: 1913 - DNA, 23 bp, Artificial Sequence
  Description of Artificial Sequence: Synthetic oligonucleotide
gctttaacgaaccaatattctgg

SEQ ID NO: 1914 - DNA, 23 bp, Artificial Sequence
  Description of Artificial Sequence: Synthetic oligonucleotide
tatttcagatctccagacagtgg

SEQ ID NO: 1915 - DNA, 23 bp, Artificial Sequence
  Description of Artificial Sequence: Synthetic oligonucleotide
tacaaacagtgaccactgtctgg

SEQ ID NO: 1916 - DNA, 23 bp, Artificial Sequence
  Description of Artificial Sequence: Synthetic oligonucleotide
caataagaacttttgttttctgg

SEQ ID NO: 1917 - DNA, 23 bp, Artificial Sequence
  Description of Artificial Sequence: Synthetic oligonucleotide
aaagtaagtatcttcgtaagagg

SEQ ID NO: 1918 - DNA, 23 bp, Artificial Sequence
  Description of Artificial Sequence: Synthetic oligonucleotide
tgtagatatattcccctctttgg

SEQ ID NO: 1919 - DNA, 23 bp, Artificial Sequence
  Description of Artificial Sequence: Synthetic oligonucleotide
ctgattgaatagccaaagagggg

SEQ ID NO: 1920 - DNA, 23 bp, Artificial Sequence
  Description of Artificial Sequence: Synthetic oligonucleotide
tctgattgaatagccaaagaggg

SEQ ID NO: 1921 - DNA, 23 bp, Artificial Sequence
  Description of Artificial Sequence: Synthetic oligonucleotide
ctctgattgaatagccaaagagg

SEQ ID NO: 1922 - DNA, 23 bp, Artificial Sequence
  Description of Artificial Sequence: Synthetic oligonucleotide
cacatatgtgtatcaggcagtgg

SEQ ID NO: 1923 - DNA, 23 bp, Artificial Sequence
  Description of Artificial Sequence: Synthetic oligonucleotide
gtaaaacacatatgtgtatcagg

SEQ ID NO: 1924 - DNA, 23 bp, Artificial Sequence
  Description of Artificial Sequence: Synthetic oligonucleotide
acatatgtgttttacagatgagg

SEQ ID NO: 1925 - DNA, 23 bp, Artificial Sequence
  Description of Artificial Sequence: Synthetic oligonucleotide
gccaatttcatcatctctctggg

SEQ ID NO: 1926 - DNA, 23 bp, Artificial Sequence
  Description of Artificial Sequence: Synthetic oligonucleotide
agccaatttcatcatctctctgg

SEQ ID NO: 1927 - DNA, 23 bp, Artificial Sequence
  Description of Artificial Sequence: Synthetic oligonucleotide
acccagagagatgatgaaattgg

SEQ ID NO: 1928 - DNA, 23 bp, Artificial Sequence
  Description of Artificial Sequence: Synthetic oligonucleotide
agagatgatgaaattggctgagg

SEQ ID NO: 1929 - DNA, 23 bp, Artificial Sequence
  Description of Artificial Sequence: Synthetic oligonucleotide
atgatgaaattggctgaggatgg

SEQ ID NO: 1930 - DNA, 23 bp, Artificial Sequence
  Description of Artificial Sequence: Synthetic oligonucleotide
ttggctgaggatggcccagctgg

SEQ ID NO: 1931 - DNA, 23 bp, Artificial Sequence
  Description of Artificial Sequence: Synthetic oligonucleotide
gagtctttcactgaccagctggg

SEQ ID NO: 1932 - DNA, 23 bp, Artificial Sequence
  Description of Artificial Sequence: Synthetic oligonucleotide
tgagtctttcactgaccagctgg

SEQ ID NO: 1933 - DNA, 23 bp, Artificial Sequence
  Description of Artificial Sequence: Synthetic oligonucleotide
gaaagactcagagccagagctgg

SEQ ID NO: 1934 - DNA, 23 bp, Artificial Sequence
  Description of Artificial Sequence: Synthetic oligonucleotide
aaagagccctgcaccagctctgg

SEQ ID NO: 1935 - DNA, 23 bp, Artificial Sequence
  Description of Artificial Sequence: Synthetic oligonucleotide
ctcagagccagagctggtgcagg

SEQ ID NO: 1936 - DNA, 23 bp, Artificial Sequence
  Description of Artificial Sequence: Synthetic oligonucleotide
tcagagccagagctggtgcaggg

SEQ ID NO: 1937 - DNA, 23 bp, Artificial Sequence
  Description of Artificial Sequence: Synthetic oligonucleotide
gttcctgaaagggaacaggaagg

SEQ ID NO: 1938 - DNA, 23 bp, Artificial Sequence
  Description of Artificial Sequence: Synthetic oligonucleotide
gagtgttcctgaaagggaacagg

SEQ ID NO: 1939 - DNA, 23 bp, Artificial Sequence
  Description of Artificial Sequence: Synthetic oligonucleotide
attccttcctgttccctttcagg

SEQ ID NO: 1940 - DNA, 23 bp, Artificial Sequence
  Description of Artificial Sequence: Synthetic oligonucleotide
gatggtgagtgttcctgaaaggg

SEQ ID NO: 1941 - DNA, 23 bp, Artificial Sequence
  Description of Artificial Sequence: Synthetic oligonucleotide
cgatggtgagtgttcctgaaagg

SEQ ID NO: 1942 - DNA, 23 bp, Artificial Sequence
  Description of Artificial Sequence: Synthetic oligonucleotide
ctttcaggaacactcaccatcgg

SEQ ID NO: 1943 - DNA, 23 bp, Artificial Sequence
  Description of Artificial Sequence: Synthetic oligonucleotide
attattcacaggaaagccgatgg

SEQ ID NO: 1944 - DNA, 23 bp, Artificial Sequence
  Description of Artificial Sequence: Synthetic oligonucleotide
tttatctcaacattattcacagg

SEQ ID NO: 1945 - DNA, 23 bp, Artificial Sequence
  Description of Artificial Sequence: Synthetic oligonucleotide
taatgttgagataaaatccttgg

SEQ ID NO: 1946 - DNA, 23 bp, Artificial Sequence
  Description of Artificial Sequence: Synthetic oligonucleotide
ctagaaaacataatgcaccaagg

SEQ ID NO: 1947 - DNA, 23 bp, Artificial Sequence
  Description of Artificial Sequence: Synthetic oligonucleotide
ttctagtcacaacattgactagg

SEQ ID NO: 1948 - DNA, 23 bp, Artificial Sequence
  Description of Artificial Sequence: Synthetic oligonucleotide
actgggagaacagaggactctgg

SEQ ID NO: 1949 - DNA, 23 bp, Artificial Sequence
  Description of Artificial Sequence: Synthetic oligonucleotide
ccaaccaactgggagaacagagg

SEQ ID NO: 1950 - DNA, 23 bp, Artificial Sequence
  Description of Artificial Sequence: Synthetic oligonucleotide
gagtcctctgttctcccagttgg

SEQ ID NO: 1951 - DNA, 23 bp, Artificial Sequence
  Description of Artificial Sequence: Synthetic oligonucleotide
acacctacagccaaccaactggg

SEQ ID NO: 1952 - DNA, 23 bp, Artificial Sequence
  Description of Artificial Sequence: Synthetic oligonucleotide
cctctgttctcccagttggttgg

SEQ ID NO: 1953 - DNA, 23 bp, Artificial Sequence
  Description of Artificial Sequence: Synthetic oligonucleotide
aacacctacagccaaccaactgg

SEQ ID NO: 1954 - DNA, 23 bp, Artificial Sequence
  Description of Artificial Sequence: Synthetic oligonucleotide
tctcccagttggttggctgtagg

SEQ ID NO: 1955 - DNA, 23 bp, Artificial Sequence
  Description of Artificial Sequence: Synthetic oligonucleotide
agttggttggctgtaggtgttgg

SEQ ID NO: 1956 - DNA, 23 bp, Artificial Sequence
  Description of Artificial Sequence: Synthetic oligonucleotide
tgtaggtgttggcagccgccagg

SEQ ID NO: 1957 - DNA, 23 bp, Artificial Sequence
  Description of Artificial Sequence: Synthetic oligonucleotide
gttctgtagaatgctcctggcgg

SEQ ID NO: 1958 - DNA, 23 bp, Artificial Sequence
  Description of Artificial Sequence: Synthetic oligonucleotide
tctgttctgtagaatgctcctgg

SEQ ID NO: 1959 - DNA, 23 bp, Artificial Sequence
  Description of Artificial Sequence: Synthetic oligonucleotide
aggagcattctacagaacagagg

SEQ ID NO: 1960 - DNA, 23 bp, Artificial Sequence
  Description of Artificial Sequence: Synthetic oligonucleotide
agcattctacagaacagaggagg

SEQ ID NO: 1961 - DNA, 23 bp, Artificial Sequence
  Description of Artificial Sequence: Synthetic oligonucleotide
gagtgagactctccttgctcagg

SEQ ID NO: 1962 - DNA, 23 bp, Artificial Sequence
  Description of Artificial Sequence: Synthetic oligonucleotide
aggtctgcctttcctgagcaagg

SEQ ID NO: 1963 - DNA, 23 bp, Artificial Sequence
  Description of Artificial Sequence: Synthetic oligonucleotide
agactctccttgctcaggaaagg

SEQ ID NO: 1964 - DNA, 23 bp, Artificial Sequence
  Description of Artificial Sequence: Synthetic oligonucleotide
ggagttatttgctaagtcatagg

SEQ ID NO: 1965 - DNA, 23 bp, Artificial Sequence
  Description of Artificial Sequence: Synthetic oligonucleotide
cttagcaaataactcctaagagg

SEQ ID NO: 1966 - DNA, 23 bp, Artificial Sequence
  Description of Artificial Sequence: Synthetic oligonucleotide
gggtgaaacactctcctcttagg

SEQ ID NO: 1967 - DNA, 23 bp, Artificial Sequence
  Description of Artificial Sequence: Synthetic oligonucleotide
agccaaggaagaggaatggtggg

SEQ ID NO: 1968 - DNA, 23 bp, Artificial Sequence
  Description of Artificial Sequence: Synthetic oligonucleotide
cagccaaggaagaggaatggtgg

SEQ ID NO: 1969 - DNA, 23 bp, Artificial Sequence
  Description of Artificial Sequence: Synthetic oligonucleotide
ccacagccaaggaagaggaatgg

SEQ ID NO: 1970 - DNA, 23 bp, Artificial Sequence
  Description of Artificial Sequence: Synthetic oligonucleotide
cacccaccattcctcttccttgg

SEQ ID NO: 1971 - DNA, 23 bp, Artificial Sequence
  Description of Artificial Sequence: Synthetic oligonucleotide
tgcctccacagccaaggaagagg

SEQ ID NO: 1972 - DNA, 23 bp, Artificial Sequence
  Description of Artificial Sequence: Synthetic oligonucleotide
ccattcctcttccttggctgtgg

SEQ ID NO: 1973 - DNA, 23 bp, Artificial Sequence
  Description of Artificial Sequence: Synthetic oligonucleotide
ctaagttgcctccacagccaagg

SEQ ID NO: 1974 - DNA, 23 bp, Artificial Sequence
  Description of Artificial Sequence: Synthetic oligonucleotide
ttcctcttccttggctgtggagg

SEQ ID NO: 1975 - DNA, 23 bp, Artificial Sequence
  Description of Artificial Sequence: Synthetic oligonucleotide
tggctgtggaggcaacttagtgg

SEQ ID NO: 1976 - DNA, 23 bp, Artificial Sequence
  Description of Artificial Sequence: Synthetic oligonucleotide
gtggaggcaacttagtggagagg

SEQ ID NO: 1977 - DNA, 23 bp, Artificial Sequence
  Description of Artificial Sequence: Synthetic oligonucleotide
tggaggcaacttagtggagaggg

SEQ ID NO: 1978 - DNA, 23 bp, Artificial Sequence
  Description of Artificial Sequence: Synthetic oligonucleotide
ggaggcaacttagtggagagggg

SEQ ID NO: 1979 - DNA, 23 bp, Artificial Sequence
  Description of Artificial Sequence: Synthetic oligonucleotide
actgttcctcacaggtcatctgg

SEQ ID NO: 1980 - DNA, 23 bp, Artificial Sequence
  Description of Artificial Sequence: Synthetic oligonucleotide
gaggggccagatgacctgtgagg

SEQ ID NO: 1981 - DNA, 23 bp, Artificial Sequence
  Description of Artificial Sequence: Synthetic oligonucleotide
agggcttcactgttcctcacagg

SEQ ID NO: 1982 - DNA, 23 bp, Artificial Sequence
  Description of Artificial Sequence: Synthetic oligonucleotide
accatacattgtgttaggcaggg

SEQ ID NO: 1983 - DNA, 23 bp, Artificial Sequence
  Description of Artificial Sequence: Synthetic oligonucleotide
aaccatacattgtgttaggcagg

SEQ ID NO: 1984 - DNA, 23 bp, Artificial Sequence
  Description of Artificial Sequence: Synthetic oligonucleotide
agacaaccatacattgtgttagg

SEQ ID NO: 1985 - DNA, 23 bp, Artificial Sequence
  Description of Artificial Sequence: Synthetic oligonucleotide
gccctgcctaacacaatgtatgg

SEQ ID NO: 1986 - DNA, 23 bp, Artificial Sequence
  Description of Artificial Sequence: Synthetic oligonucleotide
caccaacaggcaaggcccggagg

SEQ ID NO: 1987 - DNA, 23 bp, Artificial Sequence
  Description of Artificial Sequence: Synthetic oligonucleotide
ccacaccaacaggcaaggcccgg

SEQ ID NO: 1988 - DNA, 23 bp, Artificial Sequence
  Description of Artificial Sequence: Synthetic oligonucleotide
tccacccacaccaacaggcaagg

SEQ ID NO: 1989 - DNA, 23 bp, Artificial Sequence
  Description of Artificial Sequence: Synthetic oligonucleotide
atcctccgggccttgcctgttgg

SEQ ID NO: 1990 - DNA, 23 bp, Artificial Sequence
  Description of Artificial Sequence: Synthetic oligonucleotide
tcccttccacccacaccaacagg

SEQ ID NO: 1991 - DNA, 23 bp, Artificial Sequence
  Description of Artificial Sequence: Synthetic oligonucleotide
ccgggccttgcctgttggtgtgg

SEQ ID NO: 1992 - DNA, 23 bp, Artificial Sequence
  Description of Artificial Sequence: Synthetic oligonucleotide
cgggccttgcctgttggtgtggg

SEQ ID NO: 1993 - DNA, 23 bp, Artificial Sequence
  Description of Artificial Sequence: Synthetic oligonucleotide
gccttgcctgttggtgtgggtgg

SEQ ID NO: 1994 - DNA, 23 bp, Artificial Sequence
  Description of Artificial Sequence: Synthetic oligonucleotide
tgcctgttggtgtgggtggaagg

SEQ ID NO: 1995 - DNA, 23 bp, Artificial Sequence
  Description of Artificial Sequence: Synthetic oligonucleotide
gcctgttggtgtgggtggaaggg

SEQ ID NO: 1996 - DNA, 23 bp, Artificial Sequence
  Description of Artificial Sequence: Synthetic oligonucleotide
ttggtgtgggtggaagggaatgg

SEQ ID NO: 1997 - DNA, 23 bp, Artificial Sequence
  Description of Artificial Sequence: Synthetic oligonucleotide
gtgtgggtggaagggaatggtgg

SEQ ID NO: 1998 - DNA, 23 bp, Artificial Sequence
  Description of Artificial Sequence: Synthetic oligonucleotide
tgtgggtggaagggaatggtggg

SEQ ID NO: 1999 - DNA, 23 bp, Artificial Sequence
  Description of Artificial Sequence: Synthetic oligonucleotide
ggaagggaatggtgggagagagg

SEQ ID NO: 2000 - DNA, 23 bp, Artificial Sequence
  Description of Artificial Sequence: Synthetic oligonucleotide
cactctgctgccttttatgtggg

SEQ ID NO: 2001 - DNA, 23 bp, Artificial Sequence
  Description of Artificial Sequence: Synthetic oligonucleotide
gagaggagtacccacataaaagg

SEQ ID NO: 2002 - DNA, 23 bp, Artificial Sequence
  Description of Artificial Sequence: Synthetic oligonucleotide
acactctgctgccttttatgtgg

SEQ ID NO: 2003 - DNA, 23 bp, Artificial Sequence
  Description of Artificial Sequence: Synthetic oligonucleotide
aaaaggcagcagagtgtgaatgg

SEQ ID NO: 2004 - DNA, 23 bp, Artificial Sequence
  Description of Artificial Sequence: Synthetic oligonucleotide
aaaggcagcagagtgtgaatggg

SEQ ID NO: 2005 - DNA, 23 bp, Artificial Sequence
  Description of Artificial Sequence: Synthetic oligonucleotide
aaggcagcagagtgtgaatgggg

SEQ ID NO: 2006 - DNA, 23 bp, Artificial Sequence
  Description of Artificial Sequence: Synthetic oligonucleotide
aggcagcagagtgtgaatggggg

SEQ ID NO: 2007 - DNA, 23 bp, Artificial Sequence
  Description of Artificial Sequence: Synthetic oligonucleotide
cagagtgtgaatgggggcagtgg

SEQ ID NO: 2008 - DNA, 23 bp, Artificial Sequence
  Description of Artificial Sequence: Synthetic oligonucleotide
tgaatgggggcagtggcacaagg

SEQ ID NO: 2009 - DNA, 23 bp, Artificial Sequence
  Description of Artificial Sequence: Synthetic oligonucleotide
ggggcagtggcacaaggacatgg

SEQ ID NO: 2010 - DNA, 23 bp, Artificial Sequence
  Description of Artificial Sequence: Synthetic oligonucleotide
ctggggccagtgggcacgtgggg

SEQ ID NO: 2011 - DNA, 23 bp, Artificial Sequence
  Description of Artificial Sequence: Synthetic oligonucleotide
cctggggccagtgggcacgtggg

SEQ ID NO: 2012 - DNA, 23 bp, Artificial Sequence
  Description of Artificial Sequence: Synthetic oligonucleotide
gcctggggccagtgggcacgtgg

SEQ ID NO: 2013 - DNA, 23 bp, Artificial Sequence
  Description of Artificial Sequence: Synthetic oligonucleotide
cattctccccacgtgcccactgg

SEQ ID NO: 2014 - DNA, 23 bp, Artificial Sequence
  Description of Artificial Sequence: Synthetic oligonucleotide
gcatagagcctggggccagtggg

SEQ ID NO: 2015 - DNA, 23 bp, Artificial Sequence
  Description of Artificial Sequence: Synthetic oligonucleotide
cgcatagagcctggggccagtgg

SEQ ID NO: 2016 - DNA, 23 bp, Artificial Sequence
  Description of Artificial Sequence: Synthetic oligonucleotide
cccacgtgcccactggccccagg

SEQ ID NO: 2017 - DNA, 23 bp, Artificial Sequence
  Description of Artificial Sequence: Synthetic oligonucleotide
agcccctcgcatagagcctgggg

SEQ ID NO: 2018 - DNA, 23 bp, Artificial Sequence
  Description of Artificial Sequence: Synthetic oligonucleotide
cagcccctcgcatagagcctggg

SEQ ID NO: 2019 - DNA, 23 bp, Artificial Sequence
  Description of Artificial Sequence: Synthetic oligonucleotide
tcagcccctcgcatagagcctgg

SEQ ID NO: 2020 - DNA, 23 bp, Artificial Sequence
  Description of Artificial Sequence: Synthetic oligonucleotide
ctggccccaggctctatgcgagg

SEQ ID NO: 2021 - DNA, 23 bp, Artificial Sequence
  Description of Artificial Sequence: Synthetic oligonucleotide
tggccccaggctctatgcgaggg

SEQ ID NO: 2022 - DNA, 23 bp, Artificial Sequence
  Description of Artificial Sequence: Synthetic oligonucleotide
ggccccaggctctatgcgagggg

SEQ ID NO: 2023 - DNA, 23 bp, Artificial Sequence
  Description of Artificial Sequence: Synthetic oligonucleotide
aggctctatgcgaggggctgagg

SEQ ID NO: 2024 - DNA, 23 bp, Artificial Sequence
  Description of Artificial Sequence: Synthetic oligonucleotide
ctatgcgaggggctgaggaatgg

SEQ ID NO: 2025 - DNA, 23 bp, Artificial Sequence
  Description of Artificial Sequence: Synthetic oligonucleotide
aggggctgaggaatggaagctgg

SEQ ID NO: 2026 - DNA, 23 bp, Artificial Sequence
  Description of Artificial Sequence: Synthetic oligonucleotide
gaggccaggaggagcagctcagg

SEQ ID NO: 2027 - DNA, 23 bp, Artificial Sequence
  Description of Artificial Sequence: Synthetic oligonucleotide
atttcctgagctgctcctcctgg

SEQ ID NO: 2028 - DNA, 23 bp, Artificial Sequence
  Description of Artificial Sequence: Synthetic oligonucleotide
agtgtggtaaggaggccaggagg

SEQ ID NO: 2029 - DNA, 23 bp, Artificial Sequence
  Description of Artificial Sequence: Synthetic oligonucleotide
accagtgtggtaaggaggccagg

SEQ ID NO: 2030 - DNA, 23 bp, Artificial Sequence
  Description of Artificial Sequence: Synthetic oligonucleotide
actccaccagtgtggtaaggagg

SEQ ID NO: 2031 - DNA, 23 bp, Artificial Sequence
  Description of Artificial Sequence: Synthetic oligonucleotide
tctactccaccagtgtggtaagg

SEQ ID NO: 2032 - DNA, 23 bp, Artificial Sequence
  Description of Artificial Sequence: Synthetic oligonucleotide
tcctggcctccttaccacactgg

SEQ ID NO: 2033 - DNA, 23 bp, Artificial Sequence
  Description of Artificial Sequence: Synthetic oligonucleotide
tggcctccttaccacactggtgg

SEQ ID NO: 2034 - DNA, 23 bp, Artificial Sequence
  Description of Artificial Sequence: Synthetic oligonucleotide
tggagtctactccaccagtgtgg

SEQ ID NO: 2035 - DNA, 23 bp, Artificial Sequence
  Description of Artificial Sequence: Synthetic oligonucleotide
ggtggagtagactccaactgtgg

SEQ ID NO: 2036 - DNA, 23 bp, Artificial Sequence
  Description of Artificial Sequence: Synthetic oligonucleotide
gggcatggacaggccacagttgg

SEQ ID NO: 2037 - DNA, 23 bp, Artificial Sequence
  Description of Artificial Sequence: Synthetic oligonucleotide
ctgctgggaagggcatggacagg

SEQ ID NO: 2038 - DNA, 23 bp, Artificial Sequence
  Description of Artificial Sequence: Synthetic oligonucleotide
tgtgcctgctgggaagggcatgg

SEQ ID NO: 2039 - DNA, 23 bp, Artificial Sequence
  Description of Artificial Sequence: Synthetic oligonucleotide
gagcctgtgcctgctgggaaggg

SEQ ID NO: 2040 - DNA, 23 bp, Artificial Sequence
  Description of Artificial Sequence: Synthetic oligonucleotide
tgagcctgtgcctgctgggaagg

SEQ ID NO: 2041 - DNA, 23 bp, Artificial Sequence
  Description of Artificial Sequence: Synthetic oligonucleotide
ctgtccatgcccttcccagcagg

SEQ ID NO: 2042 - DNA, 23 bp, Artificial Sequence
  Description of Artificial Sequence: Synthetic oligonucleotide
agcctgagcctgtgcctgctggg

SEQ ID NO: 2043 - DNA, 23 bp, Artificial Sequence
  Description of Artificial Sequence: Synthetic oligonucleotide
gagcctgagcctgtgcctgctgg

SEQ ID NO: 2044 - DNA, 23 bp, Artificial Sequence
  Description of Artificial Sequence: Synthetic oligonucleotide
atgcccttcccagcaggcacagg

SEQ ID NO: 2045 - DNA, 23 bp, Artificial Sequence
  Description of Artificial Sequence: Synthetic oligonucleotide
ttcccagcaggcacaggctcagg

SEQ ID NO: 2046 - DNA, 23 bp, Artificial Sequence
  Description of Artificial Sequence: Synthetic oligonucleotide
gcaggcacaggctcaggctcagg

SEQ ID NO: 2047 - DNA, 23 bp, Artificial Sequence
  Description of Artificial Sequence: Synthetic oligonucleotide
caggctcaggctcaggctcttgg

SEQ ID NO: 2048 - DNA, 23 bp, Artificial Sequence
  Description of Artificial Sequence: Synthetic oligonucleotide
tcactcccagccagaggcagagg

SEQ ID NO: 2049 - DNA, 23 bp, Artificial Sequence
  Description of Artificial Sequence: Synthetic oligonucleotide
aggctcttggcctctgcctctgg

SEQ ID NO: 2050 - DNA, 23 bp, Artificial Sequence
  Description of Artificial Sequence: Synthetic oligonucleotide
tcttggcctctgcctctggctgg

SEQ ID NO: 2051 - DNA, 23 bp, Artificial Sequence
  Description of Artificial Sequence: Synthetic oligonucleotide
cttggcctctgcctctggctggg

SEQ ID NO: 2052 - DNA, 23 bp, Artificial Sequence
  Description of Artificial Sequence: Synthetic oligonucleotide
ttagaatcactcccagccagagg

SEQ ID NO: 2053 - DNA, 23 bp, Artificial Sequence
  Description of Artificial Sequence: Synthetic oligonucleotide
tgattctaaacacatccagcagg

SEQ ID NO: 2054 - DNA, 23 bp, Artificial Sequence
  Description of Artificial Sequence: Synthetic oligonucleotide
gattctaaacacatccagcaggg

SEQ ID NO: 2055 - DNA, 23 bp, Artificial Sequence
  Description of Artificial Sequence: Synthetic oligonucleotide
ggctatcaggctgaccctgctgg

SEQ ID NO: 2056 - DNA, 23 bp, Artificial Sequence
  Description of Artificial Sequence: Synthetic oligonucleotide
tcggaaactgatgggctatcagg

SEQ ID NO: 2057 - DNA, 23 bp, Artificial Sequence
  Description of Artificial Sequence: Synthetic oligonucleotide
agagctgatcggaaactgatggg

SEQ ID NO: 2058 - DNA, 23 bp, Artificial Sequence
  Description of Artificial Sequence: Synthetic oligonucleotide
cagagctgatcggaaactgatgg

SEQ ID NO: 2059 - DNA, 23 bp, Artificial Sequence
  Description of Artificial Sequence: Synthetic oligonucleotide
ggctctctagcagagctgatcgg

SEQ ID NO: 2060 - DNA, 23 bp, Artificial Sequence
  Description of Artificial Sequence: Synthetic oligonucleotide
cagctctgctagagagccgatgg

SEQ ID NO: 2061 - DNA, 23 bp, Artificial Sequence
  Description of Artificial Sequence: Synthetic oligonucleotide
agctctgctagagagccgatggg

SEQ ID NO: 2062 - DNA, 23 bp, Artificial Sequence
  Description of Artificial Sequence: Synthetic oligonucleotide
cccctcctcccacatcccatcgg

SEQ ID NO: 2063 - DNA, 23 bp, Artificial Sequence
  Description of Artificial Sequence: Synthetic oligonucleotide
gctagagagccgatgggatgtgg

SEQ ID NO: 2064 - DNA, 23 bp, Artificial Sequence
  Description of Artificial Sequence: Synthetic oligonucleotide
ctagagagccgatgggatgtggg

SEQ ID NO: 2065 - DNA, 23 bp, Artificial Sequence
  Description of Artificial Sequence: Synthetic oligonucleotide
gagagccgatgggatgtgggagg

SEQ ID NO: 2066 - DNA, 23 bp, Artificial Sequence
  Description of Artificial Sequence: Synthetic oligonucleotide
agccgatgggatgtgggaggagg

SEQ ID NO: 2067 - DNA, 23 bp, Artificial Sequence
  Description of Artificial Sequence: Synthetic oligonucleotide
gccgatgggatgtgggaggaggg

SEQ ID NO: 2068 - DNA, 23 bp, Artificial Sequence
  Description of Artificial Sequence: Synthetic oligonucleotide
ccgatgggatgtgggaggagggg

SEQ ID NO: 2069 - DNA, 23 bp, Artificial Sequence
  Description of Artificial Sequence: Synthetic oligonucleotide
cgatgggatgtgggaggaggggg

SEQ ID NO: 2070 - DNA, 23 bp, Artificial Sequence
  Description of Artificial Sequence: Synthetic oligonucleotide
atgtgggaggagggggtcactgg

SEQ ID NO: 2071 - DNA, 23 bp, Artificial Sequence
  Description of Artificial Sequence: Synthetic oligonucleotide
tgggaggagggggtcactggtgg

SEQ ID NO: 2072 - DNA, 23 bp, Artificial Sequence
  Description of Artificial Sequence: Synthetic oligonucleotide
gggaggagggggtcactggtggg

SEQ ID NO: 2073 - DNA, 23 bp, Artificial Sequence
  Description of Artificial Sequence: Synthetic oligonucleotide
ggagggggtcactggtgggctgg

SEQ ID NO: 2074 - DNA, 23 bp, Artificial Sequence
  Description of Artificial Sequence: Synthetic oligonucleotide
agggagatggggatggcttgggg

SEQ ID NO: 2075 - DNA, 23 bp, Artificial Sequence
  Description of Artificial Sequence: Synthetic oligonucleotide
gagggagatggggatggcttggg

SEQ ID NO: 2076 - DNA, 23 bp, Artificial Sequence
  Description of Artificial Sequence: Synthetic oligonucleotide
agagggagatggggatggcttgg

SEQ ID NO: 2077 - DNA, 23 bp, Artificial Sequence
  Description of Artificial Sequence: Synthetic oligonucleotide
gacacagagggagatggggatgg

SEQ ID NO: 2078 - DNA, 23 bp, Artificial Sequence
  Description of Artificial Sequence: Synthetic oligonucleotide
tttagacacagagggagatgggg

SEQ ID NO: 2079 - DNA, 23 bp, Artificial Sequence
  Description of Artificial Sequence: Synthetic oligonucleotide
gtttagacacagagggagatggg

SEQ ID NO: 2080 - DNA, 23 bp, Artificial Sequence
  Description of Artificial Sequence: Synthetic oligonucleotide
agtttagacacagagggagatgg

SEQ ID NO: 2081 - DNA, 23 bp, Artificial Sequence
  Description of Artificial Sequence: Synthetic oligonucleotide
gggccaagtttagacacagaggg

SEQ ID NO: 2082 - DNA, 23 bp, Artificial Sequence
  Description of Artificial Sequence: Synthetic oligonucleotide
agggccaagtttagacacagagg

SEQ ID NO: 2083 - DNA, 23 bp, Artificial Sequence
  Description of Artificial Sequence: Synthetic oligonucleotide
tctccctctgtgtctaaacttgg

SEQ ID NO: 2084 - DNA, 23 bp, Artificial Sequence
  Description of Artificial Sequence: Synthetic oligonucleotide
tgtgtctaaacttggccctttgg

SEQ ID NO: 2085 - DNA, 23 bp, Artificial Sequence
  Description of Artificial Sequence: Synthetic oligonucleotide
tctccctaccgaactccaaaggg

SEQ ID NO: 2086 - DNA, 23 bp, Artificial Sequence
  Description of Artificial Sequence: Synthetic oligonucleotide
ttctccctaccgaactccaaagg

SEQ ID NO: 2087 - DNA, 23 bp, Artificial Sequence
  Description of Artificial Sequence: Synthetic oligonucleotide
aaacttggccctttggagttcgg

SEQ ID NO: 2088 - DNA, 23 bp, Artificial Sequence
  Description of Artificial Sequence: Synthetic oligonucleotide
ttggccctttggagttcggtagg

SEQ ID NO: 2089 - DNA, 23 bp, Artificial Sequence
  Description of Artificial Sequence: Synthetic oligonucleotide
tggccctttggagttcggtaggg

SEQ ID NO: 2090 - DNA, 23 bp, Artificial Sequence
  Description of Artificial Sequence: Synthetic oligonucleotide
tcggtagggagaagagccatagg

SEQ ID NO: 2091 - DNA, 23 bp, Artificial Sequence
  Description of Artificial Sequence: Synthetic oligonucleotide
agggagaagagccataggccagg

SEQ ID NO: 2092 - DNA, 23 bp, Artificial Sequence
  Description of Artificial Sequence: Synthetic oligonucleotide
gggtgagcccacctggcctatgg

SEQ ID NO: 2093 - DNA, 23 bp, Artificial Sequence
  Description of Artificial Sequence: Synthetic oligonucleotide
gagaagagccataggccaggtgg

SEQ ID NO: 2094 - DNA, 23 bp, Artificial Sequence
  Description of Artificial Sequence: Synthetic oligonucleotide
agaagagccataggccaggtggg

SEQ ID NO: 2095 - DNA, 23 bp, Artificial Sequence
  Description of Artificial Sequence: Synthetic oligonucleotide
tgactctgggtgagcccacctgg

SEQ ID NO: 2096 - DNA, 23 bp, Artificial Sequence
  Description of Artificial Sequence: Synthetic oligonucleotide
tgggactctctgctgactctggg

SEQ ID NO: 2097 - DNA, 23 bp, Artificial Sequence
  Description of Artificial Sequence: Synthetic oligonucleotide
gtgggactctctgctgactctgg

SEQ ID NO: 2098 - DNA, 23 bp, Artificial Sequence
  Description of Artificial Sequence: Synthetic oligonucleotide
tcagcagagagtcccacaaatgg

SEQ ID NO: 2099 - DNA, 23 bp, Artificial Sequence
  Description of Artificial Sequence: Synthetic oligonucleotide
cgcccagtgcaaccatttgtggg

SEQ ID NO: 2100 - DNA, 23 bp, Artificial Sequence
  Description of Artificial Sequence: Synthetic oligonucleotide
tcgcccagtgcaaccatttgtgg

SEQ ID NO: 2101 - DNA, 23 bp, Artificial Sequence
  Description of Artificial Sequence: Synthetic oligonucleotide
agtcccacaaatggttgcactgg

SEQ ID NO: 2102 - DNA, 23 bp, Artificial Sequence
  Description of Artificial Sequence: Synthetic oligonucleotide
gtcccacaaatggttgcactggg

SEQ ID NO: 2103 - DNA, 23 bp, Artificial Sequence
  Description of Artificial Sequence: Synthetic oligonucleotide
gcactgggcgaaagacagcatgg

SEQ ID NO: 2104 - DNA, 23 bp, Artificial Sequence
  Description of Artificial Sequence: Synthetic oligonucleotide
aaagctctaataaaattcacagg

SEQ ID NO: 2105 - DNA, 23 bp, Artificial Sequence
  Description of Artificial Sequence: Synthetic oligonucleotide
ctacacacaagtgactgtacagg

SEQ ID NO: 2106 - DNA, 23 bp, Artificial Sequence
  Description of Artificial Sequence: Synthetic oligonucleotide
tacacacaagtgactgtacaggg

SEQ ID NO: 2107 - DNA, 23 bp, Artificial Sequence
  Description of Artificial Sequence: Synthetic oligonucleotide
acacacaagtgactgtacagggg

SEQ ID NO: 2108 - DNA, 23 bp, Artificial Sequence
  Description of Artificial Sequence: Synthetic oligonucleotide
tttgaaatagagtcatcttttgg

SEQ ID NO: 2109 - DNA, 23 bp, Artificial Sequence
  Description of Artificial Sequence: Synthetic oligonucleotide
gagtcatcttttggtatctgcgg

SEQ ID NO: 2110 - DNA, 23 bp, Artificial Sequence
  Description of Artificial Sequence: Synthetic oligonucleotide
agtcatcttttggtatctgcggg

SEQ ID NO: 2111 - DNA, 23 bp, Artificial Sequence
  Description of Artificial Sequence: Synthetic oligonucleotide
gtcatcttttggtatctgcgggg

SEQ ID NO: 2112 - DNA, 23 bp, Artificial Sequence
  Description of Artificial Sequence: Synthetic oligonucleotide
tcatcttttggtatctgcggggg

SEQ ID NO: 2113 - DNA, 23 bp, Artificial Sequence
  Description of Artificial Sequence: Synthetic oligonucleotide
atctgcgggggattgattctagg

SEQ ID NO: 2114 - DNA, 23 bp, Artificial Sequence
  Description of Artificial Sequence: Synthetic oligonucleotide
ttgattctaggacccattctagg

SEQ ID NO: 2115 - DNA, 23 bp, Artificial Sequence
  Description of Artificial Sequence: Synthetic oligonucleotide
aggatatggcatcctagaatggg

SEQ ID NO: 2116 - DNA, 23 bp, Artificial Sequence
  Description of Artificial Sequence: Synthetic oligonucleotide
gaggatatggcatcctagaatgg

SEQ ID NO: 2117 - DNA, 23 bp, Artificial Sequence
  Description of Artificial Sequence: Synthetic oligonucleotide
gacttgaacatctgaggatatgg

SEQ ID NO: 2118 - DNA, 23 bp, Artificial Sequence
  Description of Artificial Sequence: Synthetic oligonucleotide
atcagggacttgaacatctgagg

SEQ ID NO: 2119 - DNA, 23 bp, Artificial Sequence
  Description of Artificial Sequence: Synthetic oligonucleotide
tactataccactttatatcaggg

SEQ ID NO: 2120 - DNA, 23 bp, Artificial Sequence
  Description of Artificial Sequence: Synthetic oligonucleotide
atactataccactttatatcagg

SEQ ID NO: 2121 - DNA, 23 bp, Artificial Sequence
  Description of Artificial Sequence: Synthetic oligonucleotide
ttcaagtccctgatataaagtgg

SEQ ID NO: 2122 - DNA, 23 bp, Artificial Sequence
  Description of Artificial Sequence: Synthetic oligonucleotide
ttgagatgatttaaagtacatgg

SEQ ID NO: 2123 - DNA, 23 bp, Artificial Sequence
  Description of Artificial Sequence: Synthetic oligonucleotide
cataggatttacattatatttgg

SEQ ID NO: 2124 - DNA, 23 bp, Artificial Sequence
  Description of Artificial Sequence: Synthetic oligonucleotide
ggtataacaactacttacatagg

SEQ ID NO: 2125 - DNA, 23 bp, Artificial Sequence
  Description of Artificial Sequence: Synthetic oligonucleotide
taatacaaaaatttaaaagaggg

SEQ ID NO: 2126 - DNA, 23 bp, Artificial Sequence
  Description of Artificial Sequence: Synthetic oligonucleotide
ataatacaaaaatttaaaagagg

SEQ ID NO: 2127 - DNA, 23 bp, Artificial Sequence
  Description of Artificial Sequence: Synthetic oligonucleotide
tgtatttcaaaaaatatttttgg

SEQ ID NO: 2128 - DNA, 23 bp, Artificial Sequence
  Description of Artificial Sequence: Synthetic oligonucleotide
cccacagattcaactaaacatgg

SEQ ID NO: 2129 - DNA, 23 bp, Artificial Sequence
  Description of Artificial Sequence: Synthetic oligonucleotide
tccatgtttagttgaatctgtgg

SEQ ID NO: 2130 - DNA, 23 bp, Artificial Sequence
  Description of Artificial Sequence: Synthetic oligonucleotide
ccatgtttagttgaatctgtggg

SEQ ID NO: 2131 - DNA, 23 bp, Artificial Sequence
  Description of Artificial Sequence: Synthetic oligonucleotide
agttggcccttcgtatctgtggg

SEQ ID NO: 2132 - DNA, 23 bp, Artificial Sequence
  Description of Artificial Sequence: Synthetic oligonucleotide
cagttggcccttcgtatctgtgg

SEQ ID NO: 2133 - DNA, 23 bp, Artificial Sequence
  Description of Artificial Sequence: Synthetic oligonucleotide
tgaagaacccacagatacgaagg

SEQ ID NO: 2134 - DNA, 23 bp, Artificial Sequence
  Description of Artificial Sequence: Synthetic oligonucleotide
gaagaacccacagatacgaaggg

SEQ ID NO: 2135 - DNA, 23 bp, Artificial Sequence
  Description of Artificial Sequence: Synthetic oligonucleotide
aaaaaaatagccaatacagttgg

SEQ ID NO: 2136 - DNA, 23 bp, Artificial Sequence
  Description of Artificial Sequence: Synthetic oligonucleotide
atacgaagggccaactgtattgg

SEQ ID NO: 2137 - DNA, 23 bp, Artificial Sequence
  Description of Artificial Sequence: Synthetic oligonucleotide
tagttaagaatgtgagactgagg

SEQ ID NO: 2138 - DNA, 23 bp, Artificial Sequence
  Description of Artificial Sequence: Synthetic oligonucleotide
aagaatgtgagactgaggccagg

SEQ ID NO: 2139 - DNA, 23 bp, Artificial Sequence
  Description of Artificial Sequence: Synthetic oligonucleotide
aaggcatgagccactgcgcctgg

SEQ ID NO: 2140 - DNA, 23 bp, Artificial Sequence
  Description of Artificial Sequence: Synthetic oligonucleotide
gagactgaggccaggcgcagtgg

SEQ ID NO: 2141 - DNA, 23 bp, Artificial Sequence
  Description of Artificial Sequence: Synthetic oligonucleotide
tcccaaagtgctggaatcaaagg

SEQ ID NO: 2142 - DNA, 23 bp, Artificial Sequence
  Description of Artificial Sequence: Synthetic oligonucleotide
tgcctttgattccagcactttgg

SEQ ID NO: 2143 - DNA, 23 bp, Artificial Sequence
  Description of Artificial Sequence: Synthetic oligonucleotide
ctcttggcctcccaaagtgctgg

SEQ ID NO: 2144 - DNA, 23 bp, Artificial Sequence
  Description of Artificial Sequence: Synthetic oligonucleotide
gcctttgattccagcactttggg

SEQ ID NO: 2145 - DNA, 23 bp, Artificial Sequence
  Description of Artificial Sequence: Synthetic oligonucleotide
tttgattccagcactttgggagg

SEQ ID NO: 2146 - DNA, 23 bp, Artificial Sequence
  Description of Artificial Sequence: Synthetic oligonucleotide
cagcactttgggaggccaagagg

SEQ ID NO: 2147 - DNA, 23 bp, Artificial Sequence
  Description of Artificial Sequence: Synthetic oligonucleotide
agcactttgggaggccaagaggg

SEQ ID NO: 2148 - DNA, 23 bp, Artificial Sequence
  Description of Artificial Sequence: Synthetic oligonucleotide
gcactttgggaggccaagagggg

SEQ ID NO: 2149 - DNA, 23 bp, Artificial Sequence
  Description of Artificial Sequence: Synthetic oligonucleotide
ctcaggtgatcgtcccctcttgg

SEQ ID NO: 2150 - DNA, 23 bp, Artificial Sequence
  Description of Artificial Sequence: Synthetic oligonucleotide
tggtctcgaattcttggctcagg

SEQ ID NO: 2151 - DNA, 23 bp, Artificial Sequence
  Description of Artificial Sequence: Synthetic oligonucleotide
ggctgctggtctcgaattcttgg

SEQ ID NO: 2152 - DNA, 23 bp, Artificial Sequence
  Description of Artificial Sequence: Synthetic oligonucleotide
cactatgttgcacgggctgctgg

SEQ ID NO: 2153 - DNA, 23 bp, Artificial Sequence
  Description of Artificial Sequence: Synthetic oligonucleotide
aaggtctcactatgttgcacggg

SEQ ID NO: 2154 - DNA, 23 bp, Artificial Sequence
  Description of Artificial Sequence: Synthetic oligonucleotide
caaggtctcactatgttgcacgg

SEQ ID NO: 2155 - DNA, 23 bp, Artificial Sequence
  Description of Artificial Sequence: Synthetic oligonucleotide
ctcacaatctttaagagacaagg

SEQ ID NO: 2156 - DNA, 23 bp, Artificial Sequence
  Description of Artificial Sequence: Synthetic oligonucleotide
tctcttaaagattgtgagactgg

SEQ ID NO: 2157 - DNA, 23 bp, Artificial Sequence
  Description of Artificial Sequence: Synthetic oligonucleotide
ctcttaaagattgtgagactggg

SEQ ID NO: 2158 - DNA, 23 bp, Artificial Sequence
  Description of Artificial Sequence: Synthetic oligonucleotide
taaagattgtgagactgggctgg

SEQ ID NO: 2159 - DNA, 23 bp, Artificial Sequence
  Description of Artificial Sequence: Synthetic oligonucleotide
aaagattgtgagactgggctggg

SEQ ID NO: 2160 - DNA, 23 bp, Artificial Sequence
  Description of Artificial Sequence: Synthetic oligonucleotide
ttgtgagactgggctgggcacgg

SEQ ID NO: 2161 - DNA, 23 bp, Artificial Sequence
  Description of Artificial Sequence: Synthetic oligonucleotide
tgagactgggctgggcacggtgg

SEQ ID NO: 2162 - DNA, 23 bp, Artificial Sequence
  Description of Artificial Sequence: Synthetic oligonucleotide
tcccaaagtgctaggattacagg

SEQ ID NO: 2163 - DNA, 23 bp, Artificial Sequence
  Description of Artificial Sequence: Synthetic oligonucleotide
ccttggcctcccaaagtgctagg

SEQ ID NO: 2164 - DNA, 23 bp, Artificial Sequence
  Description of Artificial Sequence: Synthetic oligonucleotide
cgcctgtaatcctagcactttgg

SEQ ID NO: 2165 - DNA, 23 bp, Artificial Sequence
  Description of Artificial Sequence: Synthetic oligonucleotide
gcctgtaatcctagcactttggg

SEQ ID NO: 2166 - DNA, 23 bp, Artificial Sequence
  Description of Artificial Sequence: Synthetic oligonucleotide
tgtaatcctagcactttgggagg

SEQ ID NO: 2167 - DNA, 23 bp, Artificial Sequence
  Description of Artificial Sequence: Synthetic oligonucleotide
cctagcactttgggaggccaagg

SEQ ID NO: 2168 - DNA, 23 bp, Artificial Sequence
  Description of Artificial Sequence: Synthetic oligonucleotide
gcactttgggaggccaaggcagg

SEQ ID NO: 2169 - DNA, 23 bp, Artificial Sequence
  Description of Artificial Sequence: Synthetic oligonucleotide
ctcagttgatccacctgccttgg

SEQ ID NO: 2170 - DNA, 23 bp, Artificial Sequence
  Description of Artificial Sequence: Synthetic oligonucleotide
ctttgggaggccaaggcaggtgg

SEQ ID NO: 2171 - DNA, 23 bp, Artificial Sequence
  Description of Artificial Sequence: Synthetic oligonucleotide
caaggcaggtggatcaactgagg

SEQ ID NO: 2172 - DNA, 23 bp, Artificial Sequence
  Description of Artificial Sequence: Synthetic oligonucleotide
caggtggatcaactgaggtcagg

SEQ ID NO: 2173 - DNA, 23 bp, Artificial Sequence
  Description of Artificial Sequence: Synthetic oligonucleotide
tcaggagtttgagatcagcctgg

SEQ ID NO: 2174 - DNA, 23 bp, Artificial Sequence
  Description of Artificial Sequence: Synthetic oligonucleotide
agagtttcactatgttagccagg

SEQ ID NO: 2175 - DNA, 23 bp, Artificial Sequence
  Description of Artificial Sequence: Synthetic oligonucleotide
aaaaatacaaaaaaattagctgg

SEQ ID NO: 2176 - DNA, 23 bp, Artificial Sequence
  Description of Artificial Sequence: Synthetic oligonucleotide
aaaatacaaaaaaattagctggg

SEQ ID NO: 2177 - DNA, 23 bp, Artificial Sequence
  Description of Artificial Sequence: Synthetic oligonucleotide
acaaaaaaattagctgggtgtgg

SEQ ID NO: 2178 - DNA, 23 bp, Artificial Sequence
  Description of Artificial Sequence: Synthetic oligonucleotide
aaaaaattagctgggtgtggtgg

SEQ ID NO: 2179 - DNA, 23 bp, Artificial Sequence
  Description of Artificial Sequence: Synthetic oligonucleotide
aaattagctgggtgtggtggtgg

SEQ ID NO: 2180 - DNA, 23 bp, Artificial Sequence
  Description of Artificial Sequence: Synthetic oligonucleotide
aattagctgggtgtggtggtggg

SEQ ID NO: 2181 - DNA, 23 bp, Artificial Sequence
  Description of Artificial Sequence: Synthetic oligonucleotide
tcctgagtagctgggattatagg

SEQ ID NO: 2182 - DNA, 23 bp, Artificial Sequence
  Description of Artificial Sequence: Synthetic oligonucleotide
cctcagcctcctgagtagctggg

SEQ ID NO: 2183 - DNA, 23 bp, Artificial Sequence
  Description of Artificial Sequence: Synthetic oligonucleotide
gcctcagcctcctgagtagctgg

SEQ ID NO: 2184 - DNA, 23 bp, Artificial Sequence
  Description of Artificial Sequence: Synthetic oligonucleotide
gcctataatcccagctactcagg

SEQ ID NO: 2185 - DNA, 23 bp, Artificial Sequence
  Description of Artificial Sequence: Synthetic oligonucleotide
tataatcccagctactcaggagg

SEQ ID NO: 2186 - DNA, 23 bp, Artificial Sequence
  Description of Artificial Sequence: Synthetic oligonucleotide
cccagctactcaggaggctgagg

SEQ ID NO: 2187 - DNA, 23 bp, Artificial Sequence
  Description of Artificial Sequence: Synthetic oligonucleotide
gctactcaggaggctgaggcagg

SEQ ID NO: 2188 - DNA, 23 bp, Artificial Sequence
  Description of Artificial Sequence: Synthetic oligonucleotide
caggagaatcgcttgtatccagg

SEQ ID NO: 2189 - DNA, 23 bp, Artificial Sequence
  Description of Artificial Sequence: Synthetic oligonucleotide
gagaatcgcttgtatccaggagg

SEQ ID NO: 2190 - DNA, 23 bp, Artificial Sequence
  Description of Artificial Sequence: Synthetic oligonucleotide
aatcgcttgtatccaggaggcgg

SEQ ID NO: 2191 - DNA, 23 bp, Artificial Sequence
  Description of Artificial Sequence: Synthetic oligonucleotide
tcactgcaacctccgcctcctgg

SEQ ID NO: 2192 - DNA, 23 bp, Artificial Sequence
  Description of Artificial Sequence: Synthetic oligonucleotide
cgcttgtatccaggaggcggagg

SEQ ID NO: 2193 - DNA, 23 bp, Artificial Sequence
  Description of Artificial Sequence: Synthetic oligonucleotide
aggttgcagtgagctgagatagg

SEQ ID NO: 2194 - DNA, 23 bp, Artificial Sequence
  Description of Artificial Sequence: Synthetic oligonucleotide
ggttgcagtgagctgagataggg

SEQ ID NO: 2195 - DNA, 23 bp, Artificial Sequence
  Description of Artificial Sequence: Synthetic oligonucleotide
ttgcccaggctggagtgcaacgg

SEQ ID NO: 2196 - DNA, 23 bp, Artificial Sequence
  Description of Artificial Sequence: Synthetic oligonucleotide
agggccgttgcactccagcctgg

SEQ ID NO: 2197 - DNA, 23 bp, Artificial Sequence
  Description of Artificial Sequence: Synthetic oligonucleotide
gggccgttgcactccagcctggg

SEQ ID NO: 2198 - DNA, 23 bp, Artificial Sequence
  Description of Artificial Sequence: Synthetic oligonucleotide
tttgctcttcttgcccaggctgg

SEQ ID NO: 2199 - DNA, 23 bp, Artificial Sequence
  Description of Artificial Sequence: Synthetic oligonucleotide
gagttttgctcttcttgcccagg

SEQ ID NO: 2200 - DNA, 23 bp, Artificial Sequence
  Description of Artificial Sequence: Synthetic oligonucleotide
ttatttatttatttttgagatgg

SEQ ID NO: 2201 - DNA, 23 bp, Artificial Sequence
  Description of Artificial Sequence: Synthetic oligonucleotide
tcatgagactgagacataacagg

SEQ ID NO: 2202 - DNA, 23 bp, Artificial Sequence
  Description of Artificial Sequence: Synthetic oligonucleotide
gagactgagacataacaggaagg

SEQ ID NO: 2203 - DNA, 23 bp, Artificial Sequence
  Description of Artificial Sequence: Synthetic oligonucleotide
actgagacataacaggaaggagg

SEQ ID NO: 2204 - DNA, 23 bp, Artificial Sequence
  Description of Artificial Sequence: Synthetic oligonucleotide
ctgagacataacaggaaggaggg

SEQ ID NO: 2205 - DNA, 23 bp, Artificial Sequence
  Description of Artificial Sequence: Synthetic oligonucleotide
taacaggaaggagggcaatttgg

SEQ ID NO: 2206 - DNA, 23 bp, Artificial Sequence
  Description of Artificial Sequence: Synthetic oligonucleotide
aggaaggagggcaatttggttgg

SEQ ID NO: 2207 - DNA, 23 bp, Artificial Sequence
  Description of Artificial Sequence: Synthetic oligonucleotide
gggcaatttggttggttccaagg

SEQ ID NO: 2208 - DNA, 23 bp, Artificial Sequence
  Description of Artificial Sequence: Synthetic oligonucleotide
atcacatactctaggaaccttgg

SEQ ID NO: 2209 - DNA, 23 bp, Artificial Sequence
  Description of Artificial Sequence: Synthetic oligonucleotide
cctctcccatcacatactctagg

SEQ ID NO: 2210 - DNA, 23 bp, Artificial Sequence
  Description of Artificial Sequence: Synthetic oligonucleotide
aaggttcctagagtatgtgatgg

SEQ ID NO: 2211 - DNA, 23 bp, Artificial Sequence
  Description of Artificial Sequence: Synthetic oligonucleotide
aggttcctagagtatgtgatggg

SEQ ID NO: 2212 - DNA, 23 bp, Artificial Sequence
  Description of Artificial Sequence: Synthetic oligonucleotide
cctagagtatgtgatgggagagg

SEQ ID NO: 2213 - DNA, 23 bp, Artificial Sequence
  Description of Artificial Sequence: Synthetic oligonucleotide
gagtatgtgatgggagaggttgg

SEQ ID NO: 2214 - DNA, 23 bp, Artificial Sequence
  Description of Artificial Sequence: Synthetic oligonucleotide
tgtgatgggagaggttggtgcgg

SEQ ID NO: 2215 - DNA, 23 bp, Artificial Sequence
  Description of Artificial Sequence: Synthetic oligonucleotide
gtgatgggagaggttggtgcggg

SEQ ID NO: 2216 - DNA, 23 bp, Artificial Sequence
  Description of Artificial Sequence: Synthetic oligonucleotide
atgggagaggttggtgcgggtgg

SEQ ID NO: 2217 - DNA, 23 bp, Artificial Sequence
  Description of Artificial Sequence: Synthetic oligonucleotide
tgggagaggttggtgcgggtggg

SEQ ID NO: 2218 - DNA, 23 bp, Artificial Sequence
  Description of Artificial Sequence: Synthetic oligonucleotide
gggagaggttggtgcgggtgggg

SEQ ID NO: 2219 - DNA, 23 bp, Artificial Sequence
  Description of Artificial Sequence: Synthetic oligonucleotide
ggttggtgcgggtggggccatgg

SEQ ID NO: 2220 - DNA, 23 bp, Artificial Sequence
  Description of Artificial Sequence: Synthetic oligonucleotide
tggtgcgggtggggccatggagg

SEQ ID NO: 2221 - DNA, 23 bp, Artificial Sequence
  Description of Artificial Sequence: Synthetic oligonucleotide
cacttgagtcagtacctccatgg

SEQ ID NO: 2222 - DNA, 23 bp, Artificial Sequence
  Description of Artificial Sequence: Synthetic oligonucleotide
catggaggtactgactcaagtgg

SEQ ID NO: 2223 - DNA, 23 bp, Artificial Sequence
  Description of Artificial Sequence: Synthetic oligonucleotide
ggaggtactgactcaagtggagg

SEQ ID NO: 2224 - DNA, 23 bp, Artificial Sequence
  Description of Artificial Sequence: Synthetic oligonucleotide
gaggtactgactcaagtggaggg

SEQ ID NO: 2225 - DNA, 23 bp, Artificial Sequence
  Description of Artificial Sequence: Synthetic oligonucleotide
actgactcaagtggagggacagg

SEQ ID NO: 2226 - DNA, 23 bp, Artificial Sequence
  Description of Artificial Sequence: Synthetic oligonucleotide
gactcaagtggagggacaggtgg

SEQ ID NO: 2227 - DNA, 23 bp, Artificial Sequence
  Description of Artificial Sequence: Synthetic oligonucleotide
actcaagtggagggacaggtggg

SEQ ID NO: 2228 - DNA, 23 bp, Artificial Sequence
  Description of Artificial Sequence: Synthetic oligonucleotide
ctcaagtggagggacaggtgggg

SEQ ID NO: 2229 - DNA, 23 bp, Artificial Sequence
  Description of Artificial Sequence: Synthetic oligonucleotide
tggagggacaggtggggaaatgg

SEQ ID NO: 2230 - DNA, 23 bp, Artificial Sequence
  Description of Artificial Sequence: Synthetic oligonucleotide
ggagggacaggtggggaaatggg

SEQ ID NO: 2231 - DNA, 23 bp, Artificial Sequence
  Description of Artificial Sequence: Synthetic oligonucleotide
ggacaggtggggaaatgggatgg

SEQ ID NO: 2232 - DNA, 23 bp, Artificial Sequence
  Description of Artificial Sequence: Synthetic oligonucleotide
gacaggtggggaaatgggatggg

SEQ ID NO: 2233 - DNA, 23 bp, Artificial Sequence
  Description of Artificial Sequence: Synthetic oligonucleotide
aaaagaagattgaccttagaagg

SEQ ID NO: 2234 - DNA, 23 bp, Artificial Sequence
  Description of Artificial Sequence: Synthetic oligonucleotide
aaagaagattgaccttagaaggg

SEQ ID NO: 2235 - DNA, 23 bp, Artificial Sequence
  Description of Artificial Sequence: Synthetic oligonucleotide
aagaagattgaccttagaagggg

SEQ ID NO: 2236 - DNA, 23 bp, Artificial Sequence
  Description of Artificial Sequence: Synthetic oligonucleotide
gaggttgagctccccttctaagg

SEQ ID NO: 2237 - DNA, 23 bp, Artificial Sequence
  Description of Artificial Sequence: Synthetic oligonucleotide
ggtctgaaattagggttcagagg

SEQ ID NO: 2238 - DNA, 23 bp, Artificial Sequence
  Description of Artificial Sequence: Synthetic oligonucleotide
ttttgaagggtctgaaattaggg

SEQ ID NO: 2239 - DNA, 23 bp, Artificial Sequence
  Description of Artificial Sequence: Synthetic oligonucleotide
attttgaagggtctgaaattagg

SEQ ID NO: 2240 - DNA, 23 bp, Artificial Sequence
  Description of Artificial Sequence: Synthetic oligonucleotide
agcttaatattcattttgaaggg

SEQ ID NO: 2241 - DNA, 23 bp, Artificial Sequence
  Description of Artificial Sequence: Synthetic oligonucleotide
gagcttaatattcattttgaagg

SEQ ID NO: 2242 - DNA, 23 bp, Artificial Sequence
  Description of Artificial Sequence: Synthetic oligonucleotide
aatgaatattaagctcattttgg

SEQ ID NO: 2243 - DNA, 23 bp, Artificial Sequence
  Description of Artificial Sequence: Synthetic oligonucleotide
aatgaacatgaaactcattttgg

SEQ ID NO: 2244 - DNA, 23 bp, Artificial Sequence
  Description of Artificial Sequence: Synthetic oligonucleotide
aaactcattttggtcttataagg

SEQ ID NO: 2245 - DNA, 23 bp, Artificial Sequence
  Description of Artificial Sequence: Synthetic oligonucleotide
agcagcttgaagtttagaagggg

SEQ ID NO: 2246 - DNA, 23 bp, Artificial Sequence
  Description of Artificial Sequence: Synthetic oligonucleotide
aagcagcttgaagtttagaaggg

SEQ ID NO: 2247 - DNA, 23 bp, Artificial Sequence
  Description of Artificial Sequence: Synthetic oligonucleotide
aaagcagcttgaagtttagaagg

SEQ ID NO: 2248 - DNA, 23 bp, Artificial Sequence
  Description of Artificial Sequence: Synthetic oligonucleotide
aaagtactgtgtgtatttgcagg

SEQ ID NO: 2249 - DNA, 23 bp, Artificial Sequence
  Description of Artificial Sequence: Synthetic oligonucleotide
tgcaaatacacacagtactttgg

SEQ ID NO: 2250 - DNA, 23 bp, Artificial Sequence
  Description of Artificial Sequence: Synthetic oligonucleotide
ttattctaatagaagccattagg

SEQ ID NO: 2251 - DNA, 23 bp, Artificial Sequence
  Description of Artificial Sequence: Synthetic oligonucleotide
tattctaatagaagccattaggg

SEQ ID NO: 2252 - DNA, 23 bp, Artificial Sequence
  Description of Artificial Sequence: Synthetic oligonucleotide
tattgaaactggttccctaatgg

SEQ ID NO: 2253 - DNA, 23 bp, Artificial Sequence
  Description of Artificial Sequence: Synthetic oligonucleotide
atttacctgtttattgaaactgg

SEQ ID NO: 2254 - DNA, 23 bp, Artificial Sequence
  Description of Artificial Sequence: Synthetic oligonucleotide
gggaaccagtttcaataaacagg

SEQ ID NO: 2255 - DNA, 23 bp, Artificial Sequence
  Description of Artificial Sequence: Synthetic oligonucleotide
tgtaagactagtttgtaattagg

SEQ ID NO: 2256 - DNA, 23 bp, Artificial Sequence
  Description of Artificial Sequence: Synthetic oligonucleotide
acagaggcaggaatggacactgg

SEQ ID NO: 2257 - DNA, 23 bp, Artificial Sequence
  Description of Artificial Sequence: Synthetic oligonucleotide
ttagataacagaggcaggaatgg

SEQ ID NO: 2258 - DNA, 23 bp, Artificial Sequence
  Description of Artificial Sequence: Synthetic oligonucleotide
gacatttagataacagaggcagg

SEQ ID NO: 2259 - DNA, 23 bp, Artificial Sequence
  Description of Artificial Sequence: Synthetic oligonucleotide
cccagacatttagataacagagg

SEQ ID NO: 2260 - DNA, 23 bp, Artificial Sequence
  Description of Artificial Sequence: Synthetic oligonucleotide
gcctctgttatctaaatgtctgg

SEQ ID NO: 2261 - DNA, 23 bp, Artificial Sequence
  Description of Artificial Sequence: Synthetic oligonucleotide
cctctgttatctaaatgtctggg

SEQ ID NO: 2262 - DNA, 23 bp, Artificial Sequence
  Description of Artificial Sequence: Synthetic oligonucleotide
tctacgtgaactcaactaattgg

SEQ ID NO: 2263 - DNA, 23 bp, Artificial Sequence
  Description of Artificial Sequence: Synthetic oligonucleotide
ttagttgagttcacgtagacagg

SEQ ID NO: 2264 - DNA, 23 bp, Artificial Sequence
  Description of Artificial Sequence: Synthetic oligonucleotide
ggctgtttctggggggcttaagg

SEQ ID NO: 2265 - DNA, 23 bp, Artificial Sequence
  Description of Artificial Sequence: Synthetic oligonucleotide
aaagacaggctgtttctgggggg

SEQ ID NO: 2266 - DNA, 23 bp, Artificial Sequence
  Description of Artificial Sequence: Synthetic oligonucleotide
caaagacaggctgtttctggggg

SEQ ID NO: 2267 - DNA, 23 bp, Artificial Sequence
  Description of Artificial Sequence: Synthetic oligonucleotide
ccaaagacaggctgtttctgggg

SEQ ID NO: 2268 - DNA, 23 bp, Artificial Sequence
  Description of Artificial Sequence: Synthetic oligonucleotide
cccaaagacaggctgtttctggg

SEQ ID NO: 2269 - DNA, 23 bp, Artificial Sequence
  Description of Artificial Sequence: Synthetic oligonucleotide
gcccaaagacaggctgtttctgg

SEQ ID NO: 2270 - DNA, 23 bp, Artificial Sequence
  Description of Artificial Sequence: Synthetic oligonucleotide
ccccagaaacagcctgtctttgg

SEQ ID NO: 2271 - DNA, 23 bp, Artificial Sequence
  Description of Artificial Sequence: Synthetic oligonucleotide
cccagaaacagcctgtctttggg

SEQ ID NO: 2272 - DNA, 23 bp, Artificial Sequence
  Description of Artificial Sequence: Synthetic oligonucleotide
atgtgggaaagcccaaagacagg

SEQ ID NO: 2273 - DNA, 23 bp, Artificial Sequence
  Description of Artificial Sequence: Synthetic oligonucleotide
gagaggacgaggaggcatgtggg

SEQ ID NO: 2274 - DNA, 23 bp, Artificial Sequence
  Description of Artificial Sequence: Synthetic oligonucleotide
ggagaggacgaggaggcatgtgg

SEQ ID NO: 2275 - DNA, 23 bp, Artificial Sequence
  Description of Artificial Sequence: Synthetic oligonucleotide
tacaggtggagaggacgaggagg

SEQ ID NO: 2276 - DNA, 23 bp, Artificial Sequence
  Description of Artificial Sequence: Synthetic oligonucleotide
atctacaggtggagaggacgagg

SEQ ID NO: 2277 - DNA, 23 bp, Artificial Sequence
  Description of Artificial Sequence: Synthetic oligonucleotide
cggtacatctacaggtggagagg

SEQ ID NO: 2278 - DNA, 23 bp, Artificial Sequence
  Description of Artificial Sequence: Synthetic oligonucleotide
gagcacggtacatctacaggtgg

SEQ ID NO: 2279 - DNA, 23 bp, Artificial Sequence
  Description of Artificial Sequence: Synthetic oligonucleotide
agagagcacggtacatctacagg

SEQ ID NO: 2280 - DNA, 23 bp, Artificial Sequence
  Description of Artificial Sequence: Synthetic oligonucleotide
cccttctctgacagagagcacgg

SEQ ID NO: 2281 - DNA, 23 bp, Artificial Sequence
  Description of Artificial Sequence: Synthetic oligonucleotide
accgtgctctctgtcagagaagg

SEQ ID NO: 2282 - DNA, 23 bp, Artificial Sequence
  Description of Artificial Sequence: Synthetic oligonucleotide
ccgtgctctctgtcagagaaggg

SEQ ID NO: 2283 - DNA, 23 bp, Artificial Sequence
  Description of Artificial Sequence: Synthetic oligonucleotide
tgctctctgtcagagaagggagg

SEQ ID NO: 2284 - DNA, 23 bp, Artificial Sequence
  Description of Artificial Sequence: Synthetic oligonucleotide
gctctctgtcagagaagggaggg

SEQ ID NO: 2285 - DNA, 23 bp, Artificial Sequence
  Description of Artificial Sequence: Synthetic oligonucleotide
ctgtcagagaagggagggtgtgg

SEQ ID NO: 2286 - DNA, 23 bp, Artificial Sequence
  Description of Artificial Sequence: Synthetic oligonucleotide
cagagaagggagggtgtggttgg

SEQ ID NO: 2287 - DNA, 23 bp, Artificial Sequence
  Description of Artificial Sequence: Synthetic oligonucleotide
agagaagggagggtgtggttggg

SEQ ID NO: 2288 - DNA, 23 bp, Artificial Sequence
  Description of Artificial Sequence: Synthetic oligonucleotide
aagggagggtgtggttgggctgg

SEQ ID NO: 2289 - DNA, 23 bp, Artificial Sequence
  Description of Artificial Sequence: Synthetic oligonucleotide
tggttgggctggacccccagagg

SEQ ID NO: 2290 - DNA, 23 bp, Artificial Sequence
  Description of Artificial Sequence: Synthetic oligonucleotide
gaaggagggatggcctctggggg

SEQ ID NO: 2291 - DNA, 23 bp, Artificial Sequence
  Description of Artificial Sequence: Synthetic oligonucleotide
agaaggagggatggcctctgggg

SEQ ID NO: 2292 - DNA, 23 bp, Artificial Sequence
  Description of Artificial Sequence: Synthetic oligonucleotide
cagaaggagggatggcctctggg

SEQ ID NO: 2293 - DNA, 23 bp, Artificial Sequence
  Description of Artificial Sequence: Synthetic oligonucleotide
acagaaggagggatggcctctgg

SEQ ID NO: 2294 - DNA, 23 bp, Artificial Sequence
  Description of Artificial Sequence: Synthetic oligonucleotide
gcagaagacagaaggagggatgg

SEQ ID NO: 2295 - DNA, 23 bp, Artificial Sequence
  Description of Artificial Sequence: Synthetic oligonucleotide
aggagcagaagacagaaggaggg

SEQ ID NO: 2296 - DNA, 23 bp, Artificial Sequence
  Description of Artificial Sequence: Synthetic oligonucleotide
caggagcagaagacagaaggagg

SEQ ID NO: 2297 - DNA, 23 bp, Artificial Sequence
  Description of Artificial Sequence: Synthetic oligonucleotide
ctgcaggagcagaagacagaagg

SEQ ID NO: 2298 - DNA, 23 bp, Artificial Sequence
  Description of Artificial Sequence: Synthetic oligonucleotide
agagtcccccgggcagacggagg

SEQ ID NO: 2299 - DNA, 23 bp, Artificial Sequence
  Description of Artificial Sequence: Synthetic oligonucleotide
tgagatgacctccgtctgcccgg

SEQ ID NO: 2300 - DNA, 23 bp, Artificial Sequence
  Description of Artificial Sequence: Synthetic oligonucleotide
ataagagtcccccgggcagacgg

SEQ ID NO: 2301 - DNA, 23 bp, Artificial Sequence
  Description of Artificial Sequence: Synthetic oligonucleotide
gagatgacctccgtctgcccggg

SEQ ID NO: 2302 - DNA, 23 bp, Artificial Sequence
  Description of Artificial Sequence: Synthetic oligonucleotide
agatgacctccgtctgcccgggg

SEQ ID NO: 2303 - DNA, 23 bp, Artificial Sequence
  Description of Artificial Sequence: Synthetic oligonucleotide
gatgacctccgtctgcccggggg

SEQ ID NO: 2304 - DNA, 23 bp, Artificial Sequence
  Description of Artificial Sequence: Synthetic oligonucleotide
gttccccataagagtcccccggg

SEQ ID NO: 2305 - DNA, 23 bp, Artificial Sequence
  Description of Artificial Sequence: Synthetic oligonucleotide
agttccccataagagtcccccgg

SEQ ID NO: 2306 - DNA, 23 bp, Artificial Sequence
  Description of Artificial Sequence: Synthetic oligonucleotide
gtctgcccgggggactcttatgg

SEQ ID NO: 2307 - DNA, 23 bp, Artificial Sequence
  Description of Artificial Sequence: Synthetic oligonucleotide
tctgcccgggggactcttatggg

SEQ ID NO: 2308 - DNA, 23 bp, Artificial Sequence
  Description of Artificial Sequence: Synthetic oligonucleotide
ctgcccgggggactcttatgggg

SEQ ID NO: 2309 - DNA, 23 bp, Artificial Sequence
  Description of Artificial Sequence: Synthetic oligonucleotide
gcccacccctcggggaagtaagg

SEQ ID NO: 2310 - DNA, 23 bp, Artificial Sequence
  Description of Artificial Sequence: Synthetic oligonucleotide
ggaactgccttacttccccgagg

SEQ ID NO: 2311 - DNA, 23 bp, Artificial Sequence
  Description of Artificial Sequence: Synthetic oligonucleotide
gaactgccttacttccccgaggg

SEQ ID NO: 2312 - DNA, 23 bp, Artificial Sequence
  Description of Artificial Sequence: Synthetic oligonucleotide
aactgccttacttccccgagggg

SEQ ID NO: 2313 - DNA, 23 bp, Artificial Sequence
  Description of Artificial Sequence: Synthetic oligonucleotide
ttcatcatgcccacccctcgggg

SEQ ID NO: 2314 - DNA, 23 bp, Artificial Sequence
  Description of Artificial Sequence: Synthetic oligonucleotide
tgccttacttccccgaggggtgg

SEQ ID NO: 2315 - DNA, 23 bp, Artificial Sequence
  Description of Artificial Sequence: Synthetic oligonucleotide
attcatcatgcccacccctcggg

SEQ ID NO: 2316 - DNA, 23 bp, Artificial Sequence
  Description of Artificial Sequence: Synthetic oligonucleotide
gccttacttccccgaggggtggg

SEQ ID NO: 2317 - DNA, 23 bp, Artificial Sequence
  Description of Artificial Sequence: Synthetic oligonucleotide
cattcatcatgcccacccctcgg

SEQ ID NO: 2318 - DNA, 23 bp, Artificial Sequence
  Description of Artificial Sequence: Synthetic oligonucleotide
cgaggggtgggcatgatgaatgg

SEQ ID NO: 2319 - DNA, 23 bp, Artificial Sequence
  Description of Artificial Sequence: Synthetic oligonucleotide
gaggggtgggcatgatgaatggg

SEQ ID NO: 2320 - DNA, 23 bp, Artificial Sequence
  Description of Artificial Sequence: Synthetic oligonucleotide
agaaagcttcctgaaacagtagg

SEQ ID NO: 2321 - DNA, 23 bp, Artificial Sequence
  Description of Artificial Sequence: Synthetic oligonucleotide
cagtcatttcctactgtttcagg

SEQ ID NO: 2322 - DNA, 23 bp, Artificial Sequence
  Description of Artificial Sequence: Synthetic oligonucleotide
cagccttttctaaggggttaagg

SEQ ID NO: 2323 - DNA, 23 bp, Artificial Sequence
  Description of Artificial Sequence: Synthetic oligonucleotide
gttccacagccttttctaagggg

SEQ ID NO: 2324 - DNA, 23 bp, Artificial Sequence
  Description of Artificial Sequence: Synthetic oligonucleotide
agttccacagccttttctaaggg

SEQ ID NO: 2325 - DNA, 23 bp, Artificial Sequence
  Description of Artificial Sequence: Synthetic oligonucleotide
tctccttaaccccttagaaaagg

SEQ ID NO: 2326 - DNA, 23 bp, Artificial Sequence
  Description of Artificial Sequence: Synthetic oligonucleotide
aagttccacagccttttctaagg

SEQ ID NO: 2327 - DNA, 23 bp, Artificial Sequence
  Description of Artificial Sequence: Synthetic oligonucleotide
taaccccttagaaaaggctgtgg

SEQ ID NO: 2328 - DNA, 23 bp, Artificial Sequence
  Description of Artificial Sequence: Synthetic oligonucleotide
gagctaaaatatgtcttaccagg

SEQ ID NO: 2329 - DNA, 23 bp, Artificial Sequence
  Description of Artificial Sequence: Synthetic oligonucleotide
ggggggcattagacgcaacctgg

SEQ ID NO: 2330 - DNA, 23 bp, Artificial Sequence
  Description of Artificial Sequence: Synthetic oligonucleotide
tctgcccagtagggaacgggggg

SEQ ID NO: 2331 - DNA, 23 bp, Artificial Sequence
  Description of Artificial Sequence: Synthetic oligonucleotide
ttctgcccagtagggaacggggg

SEQ ID NO: 2332 - DNA, 23 bp, Artificial Sequence
  Description of Artificial Sequence: Synthetic oligonucleotide
tttctgcccagtagggaacgggg

SEQ ID NO: 2333 - DNA, 23 bp, Artificial Sequence
  Description of Artificial Sequence: Synthetic oligonucleotide
ctttctgcccagtagggaacggg

SEQ ID NO: 2334 - DNA, 23 bp, Artificial Sequence
  Description of Artificial Sequence: Synthetic oligonucleotide
tctttctgcccagtagggaacgg

SEQ ID NO: 2335 - DNA, 23 bp, Artificial Sequence
  Description of Artificial Sequence: Synthetic oligonucleotide
taatgccccccgttccctactgg

SEQ ID NO: 2336 - DNA, 23 bp, Artificial Sequence
  Description of Artificial Sequence: Synthetic oligonucleotide
aatgccccccgttccctactggg

SEQ ID NO: 2337 - DNA, 23 bp, Artificial Sequence
  Description of Artificial Sequence: Synthetic oligonucleotide
ccaagtctttctgcccagtaggg

SEQ ID NO: 2338 - DNA, 23 bp, Artificial Sequence
  Description of Artificial Sequence: Synthetic oligonucleotide
cccaagtctttctgcccagtagg

SEQ ID NO: 2339 - DNA, 23 bp, Artificial Sequence
  Description of Artificial Sequence: Synthetic oligonucleotide
ccctactgggcagaaagacttgg

SEQ ID NO: 2340 - DNA, 23 bp, Artificial Sequence
  Description of Artificial Sequence: Synthetic oligonucleotide
cctactgggcagaaagacttggg

SEQ ID NO: 2341 - DNA, 23 bp, Artificial Sequence
  Description of Artificial Sequence: Synthetic oligonucleotide
aaagacttgggtgcttcctgagg

SEQ ID NO: 2342 - DNA, 23 bp, Artificial Sequence
  Description of Artificial Sequence: Synthetic oligonucleotide
gacttgggtgcttcctgaggagg

SEQ ID NO: 2343 - DNA, 23 bp, Artificial Sequence
  Description of Artificial Sequence: Synthetic oligonucleotide
acttgggtgcttcctgaggaggg

SEQ ID NO: 2344 - DNA, 23 bp, Artificial Sequence
  Description of Artificial Sequence: Synthetic oligonucleotide
tctgccaaggatccctcctcagg

SEQ ID NO: 2345 - DNA, 23 bp, Artificial Sequence
  Description of Artificial Sequence: Synthetic oligonucleotide
gcttcctgaggagggatccttgg

SEQ ID NO: 2346 - DNA, 23 bp, Artificial Sequence
  Description of Artificial Sequence: Synthetic oligonucleotide
cccaggcctctcttctgccaagg

SEQ ID NO: 2347 - DNA, 23 bp, Artificial Sequence
  Description of Artificial Sequence: Synthetic oligonucleotide
agggatccttggcagaagagagg

SEQ ID NO: 2348 - DNA, 23 bp, Artificial Sequence
  Description of Artificial Sequence: Synthetic oligonucleotide
tccttggcagaagagaggcctgg

SEQ ID NO: 2349 - DNA, 23 bp, Artificial Sequence
  Description of Artificial Sequence: Synthetic oligonucleotide
ccttggcagaagagaggcctggg

SEQ ID NO: 2350 - DNA, 23 bp, Artificial Sequence
  Description of Artificial Sequence: Synthetic oligonucleotide
ttctcagccctcgtgagcccagg

SEQ ID NO: 2351 - DNA, 23 bp, Artificial Sequence
  Description of Artificial Sequence: Synthetic oligonucleotide
aagagaggcctgggctcacgagg

SEQ ID NO: 2352 - DNA, 23 bp, Artificial Sequence
  Description of Artificial Sequence: Synthetic oligonucleotide
agagaggcctgggctcacgaggg

SEQ ID NO: 2353 - DNA, 23 bp, Artificial Sequence
  Description of Artificial Sequence: Synthetic oligonucleotide
agatgggtccttgcaactctggg

SEQ ID NO: 2354 - DNA, 23 bp, Artificial Sequence
  Description of Artificial Sequence: Synthetic oligonucleotide
gagatgggtccttgcaactctgg

SEQ ID NO: 2355 - DNA, 23 bp, Artificial Sequence
  Description of Artificial Sequence: Synthetic oligonucleotide
acatgtttcccagagttgcaagg

SEQ ID NO: 2356 - DNA, 23 bp, Artificial Sequence
  Description of Artificial Sequence: Synthetic oligonucleotide
agactctgtgtttaagagatggg

SEQ ID NO: 2357 - DNA, 23 bp, Artificial Sequence
  Description of Artificial Sequence: Synthetic oligonucleotide
cagactctgtgtttaagagatgg

SEQ ID NO: 2358 - DNA, 23 bp, Artificial Sequence
  Description of Artificial Sequence: Synthetic oligonucleotide
aaggacagggtgtcagttagggg

SEQ ID NO: 2359 - DNA, 23 bp, Artificial Sequence
  Description of Artificial Sequence: Synthetic oligonucleotide
gaaggacagggtgtcagttaggg

SEQ ID NO: 2360 - DNA, 23 bp, Artificial Sequence
  Description of Artificial Sequence: Synthetic oligonucleotide
ggaaggacagggtgtcagttagg

SEQ ID NO: 2361 - DNA, 23 bp, Artificial Sequence
  Description of Artificial Sequence: Synthetic oligonucleotide
agggccatgcagtatggctgggg

SEQ ID NO: 2362 - DNA, 23 bp, Artificial Sequence
  Description of Artificial Sequence: Synthetic oligonucleotide
aagggccatgcagtatggctggg

SEQ ID NO: 2363 - DNA, 23 bp, Artificial Sequence
  Description of Artificial Sequence: Synthetic oligonucleotide
caagggccatgcagtatggctgg

SEQ ID NO: 2364 - DNA, 23 bp, Artificial Sequence
  Description of Artificial Sequence: Synthetic oligonucleotide
gcaccaagggccatgcagtatgg

SEQ ID NO: 2365 - DNA, 23 bp, Artificial Sequence
  Description of Artificial Sequence: Synthetic oligonucleotide
ggatccccagccatactgcatgg

SEQ ID NO: 2366 - DNA, 23 bp, Artificial Sequence
  Description of Artificial Sequence: Synthetic oligonucleotide
cagccatactgcatggcccttgg

SEQ ID NO: 2367 - DNA, 23 bp, Artificial Sequence
  Description of Artificial Sequence: Synthetic oligonucleotide
atgggttcattatgcaccaaggg

SEQ ID NO: 2368 - DNA, 23 bp, Artificial Sequence
  Description of Artificial Sequence: Synthetic oligonucleotide
aatgggttcattatgcaccaagg

SEQ ID NO: 2369 - DNA, 23 bp, Artificial Sequence
  Description of Artificial Sequence: Synthetic oligonucleotide
cccacacatggaacagaaatggg

SEQ ID NO: 2370 - DNA, 23 bp, Artificial Sequence
  Description of Artificial Sequence: Synthetic oligonucleotide
gcccacacatggaacagaaatgg

SEQ ID NO: 2371 - DNA, 23 bp, Artificial Sequence
  Description of Artificial Sequence: Synthetic oligonucleotide
acccatttctgttccatgtgtgg

SEQ ID NO: 2372 - DNA, 23 bp, Artificial Sequence
  Description of Artificial Sequence: Synthetic oligonucleotide
cccatttctgttccatgtgtggg

SEQ ID NO: 2373 - DNA, 23 bp, Artificial Sequence
  Description of Artificial Sequence: Synthetic oligonucleotide
cccagaaaccagcccacacatgg

SEQ ID NO: 2374 - DNA, 23 bp, Artificial Sequence
  Description of Artificial Sequence: Synthetic oligonucleotide
tttctgttccatgtgtgggctgg

SEQ ID NO: 2375 - DNA, 23 bp, Artificial Sequence
  Description of Artificial Sequence: Synthetic oligonucleotide
tccatgtgtgggctggtttctgg

SEQ ID NO: 2376 - DNA, 23 bp, Artificial Sequence
  Description of Artificial Sequence: Synthetic oligonucleotide
ccatgtgtgggctggtttctggg

SEQ ID NO: 2377 - DNA, 23 bp, Artificial Sequence
  Description of Artificial Sequence: Synthetic oligonucleotide
catgtgtgggctggtttctgggg

SEQ ID NO: 2378 - DNA, 23 bp, Artificial Sequence
  Description of Artificial Sequence: Synthetic oligonucleotide
gaagcaggcacaaagagggtggg

SEQ ID NO: 2379 - DNA, 23 bp, Artificial Sequence
  Description of Artificial Sequence: Synthetic oligonucleotide
agaagcaggcacaaagagggtgg

SEQ ID NO: 2380 - DNA, 23 bp, Artificial Sequence
  Description of Artificial Sequence: Synthetic oligonucleotide
aggagaagcaggcacaaagaggg

SEQ ID NO: 2381 - DNA, 23 bp, Artificial Sequence
  Description of Artificial Sequence: Synthetic oligonucleotide
aaggagaagcaggcacaaagagg

SEQ ID NO: 2382 - DNA, 23 bp, Artificial Sequence
  Description of Artificial Sequence: Synthetic oligonucleotide
tagagggcccaaggagaagcagg

SEQ ID NO: 2383 - DNA, 23 bp, Artificial Sequence
  Description of Artificial Sequence: Synthetic oligonucleotide
tctttgtgcctgcttctccttgg

SEQ ID NO: 2384 - DNA, 23 bp, Artificial Sequence
  Description of Artificial Sequence: Synthetic oligonucleotide
ctttgtgcctgcttctccttggg

SEQ ID NO: 2385 - DNA, 23 bp, Artificial Sequence
  Description of Artificial Sequence: Synthetic oligonucleotide
gctgtggaatagagggcccaagg

SEQ ID NO: 2386 - DNA, 23 bp, Artificial Sequence
  Description of Artificial Sequence: Synthetic oligonucleotide
tccacaagctgtggaatagaggg

SEQ ID NO: 2387 - DNA, 23 bp, Artificial Sequence
  Description of Artificial Sequence: Synthetic oligonucleotide
ttccacaagctgtggaatagagg

SEQ ID NO: 2388 - DNA, 23 bp, Artificial Sequence
  Description of Artificial Sequence: Synthetic oligonucleotide
aatgtgggttccacaagctgtgg

SEQ ID NO: 2389 - DNA, 23 bp, Artificial Sequence
  Description of Artificial Sequence: Synthetic oligonucleotide
gccctctattccacagcttgtgg

SEQ ID NO: 2390 - DNA, 23 bp, Artificial Sequence
  Description of Artificial Sequence: Synthetic oligonucleotide
caaacacagtagcaaaatgtggg

SEQ ID NO: 2391 - DNA, 23 bp, Artificial Sequence
  Description of Artificial Sequence: Synthetic oligonucleotide
tcaaacacagtagcaaaatgtgg

SEQ ID NO: 2392 - DNA, 23 bp, Artificial Sequence
  Description of Artificial Sequence: Synthetic oligonucleotide
aaaacactgttttctcctcccgg

SEQ ID NO: 2393 - DNA, 23 bp, Artificial Sequence
  Description of Artificial Sequence: Synthetic oligonucleotide
aaacactgttttctcctcccggg

SEQ ID NO: 2394 - DNA, 23 bp, Artificial Sequence
  Description of Artificial Sequence: Synthetic oligonucleotide
aacactgttttctcctcccgggg

SEQ ID NO: 2395 - DNA, 23 bp, Artificial Sequence
  Description of Artificial Sequence: Synthetic oligonucleotide
catagtcccaaagccccgggagg

SEQ ID NO: 2396 - DNA, 23 bp, Artificial Sequence
  Description of Artificial Sequence: Synthetic oligonucleotide
aggcatagtcccaaagccccggg

SEQ ID NO: 2397 - DNA, 23 bp, Artificial Sequence
  Description of Artificial Sequence: Synthetic oligonucleotide
gttttctcctcccggggctttgg

SEQ ID NO: 2398 - DNA, 23 bp, Artificial Sequence
  Description of Artificial Sequence: Synthetic oligonucleotide
gaggcatagtcccaaagccccgg

SEQ ID NO: 2399 - DNA, 23 bp, Artificial Sequence
  Description of Artificial Sequence: Synthetic oligonucleotide
ttttctcctcccggggctttggg

SEQ ID NO: 2400 - DNA, 23 bp, Artificial Sequence
  Description of Artificial Sequence: Synthetic oligonucleotide
atgagcagtcaacacaacagagg

SEQ ID NO: 2401 - DNA, 23 bp, Artificial Sequence
  Description of Artificial Sequence: Synthetic oligonucleotide
gctcatccttgctgcttctctgg

SEQ ID NO: 2402 - DNA, 23 bp, Artificial Sequence
  Description of Artificial Sequence: Synthetic oligonucleotide
ctcatccttgctgcttctctggg

SEQ ID NO: 2403 - DNA, 23 bp, Artificial Sequence
  Description of Artificial Sequence: Synthetic oligonucleotide
caagcctgggcctccacccaggg

SEQ ID NO: 2404 - DNA, 23 bp, Artificial Sequence
  Description of Artificial Sequence: Synthetic oligonucleotide
taagggactgccctgggtggagg

SEQ ID NO: 2405 - DNA, 23 bp, Artificial Sequence
  Description of Artificial Sequence: Synthetic oligonucleotide
ccaagcctgggcctccacccagg

SEQ ID NO: 2406 - DNA, 23 bp, Artificial Sequence
  Description of Artificial Sequence: Synthetic oligonucleotide
actgccctgggtggaggcccagg

SEQ ID NO: 2407 - DNA, 23 bp, Artificial Sequence
  Description of Artificial Sequence: Synthetic oligonucleotide
cctgggtggaggcccaggcttgg

SEQ ID NO: 2408 - DNA, 23 bp, Artificial Sequence
  Description of Artificial Sequence: Synthetic oligonucleotide
ctgggtggaggcccaggcttggg

SEQ ID NO: 2409 - DNA, 23 bp, Artificial Sequence
  Description of Artificial Sequence: Synthetic oligonucleotide
aggcaatgtgtcccaagcctggg

SEQ ID NO: 2410 - DNA, 23 bp, Artificial Sequence
  Description of Artificial Sequence: Synthetic oligonucleotide
gaggcaatgtgtcccaagcctgg

SEQ ID NO: 2411 - DNA, 23 bp, Artificial Sequence
  Description of Artificial Sequence: Synthetic oligonucleotide
gggacacattgcctcccaagagg

SEQ ID NO: 2412 - DNA, 23 bp, Artificial Sequence
  Description of Artificial Sequence: Synthetic oligonucleotide
cctgctaggcccctcttgggagg

SEQ ID NO: 2413 - DNA, 23 bp, Artificial Sequence
  Description of Artificial Sequence: Synthetic oligonucleotide
ggacacattgcctcccaagaggg

SEQ ID NO: 2414 - DNA, 23 bp, Artificial Sequence
  Description of Artificial Sequence: Synthetic oligonucleotide
gacacattgcctcccaagagggg

SEQ ID NO: 2415 - DNA, 23 bp, Artificial Sequence
  Description of Artificial Sequence: Synthetic oligonucleotide
gttcctgctaggcccctcttggg

SEQ ID NO: 2416 - DNA, 23 bp, Artificial Sequence
  Description of Artificial Sequence: Synthetic oligonucleotide
agttcctgctaggcccctcttgg

SEQ ID NO: 2417 - DNA, 23 bp, Artificial Sequence
  Description of Artificial Sequence: Synthetic oligonucleotide
cctcccaagaggggcctagcagg

SEQ ID NO: 2418 - DNA, 23 bp, Artificial Sequence
  Description of Artificial Sequence: Synthetic oligonucleotide
cctgcagaagagttcctgctagg

SEQ ID NO: 2419 - DNA, 23 bp, Artificial Sequence
  Description of Artificial Sequence: Synthetic oligonucleotide
cctagcaggaactcttctgcagg

SEQ ID NO: 2420 - DNA, 23 bp, Artificial Sequence
  Description of Artificial Sequence: Synthetic oligonucleotide
caggaactcttctgcaggagagg

SEQ ID NO: 2421 - DNA, 23 bp, Artificial Sequence
  Description of Artificial Sequence: Synthetic oligonucleotide
ctcttctgcaggagaggtagagg

SEQ ID NO: 2422 - DNA, 23 bp, Artificial Sequence
  Description of Artificial Sequence: Synthetic oligonucleotide
tctgcaggagaggtagaggatgg

SEQ ID NO: 2423 - DNA, 23 bp, Artificial Sequence
  Description of Artificial Sequence: Synthetic oligonucleotide
aggtagaggatggctcctgtagg

SEQ ID NO: 2424 - DNA, 23 bp, Artificial Sequence
  Description of Artificial Sequence: Synthetic oligonucleotide
ggtagaggatggctcctgtaggg

SEQ ID NO: 2425 - DNA, 23 bp, Artificial Sequence
  Description of Artificial Sequence: Synthetic oligonucleotide
gtagaggatggctcctgtagggg

SEQ ID NO: 2426 - DNA, 23 bp, Artificial Sequence
  Description of Artificial Sequence: Synthetic oligonucleotide
cctgctctatgttcccctacagg

SEQ ID NO: 2427 - DNA, 23 bp, Artificial Sequence
  Description of Artificial Sequence: Synthetic oligonucleotide
cctgtaggggaacatagagcagg

SEQ ID NO: 2428 - DNA, 23 bp, Artificial Sequence
  Description of Artificial Sequence: Synthetic oligonucleotide
ccatgttcaagggcattcagggg

SEQ ID NO: 2429 - DNA, 23 bp, Artificial Sequence
  Description of Artificial Sequence: Synthetic oligonucleotide
tccatgttcaagggcattcaggg

SEQ ID NO: 2430 - DNA, 23 bp, Artificial Sequence
  Description of Artificial Sequence: Synthetic oligonucleotide
ctccatgttcaagggcattcagg

SEQ ID NO: 2431 - DNA, 23 bp, Artificial Sequence
  Description of Artificial Sequence: Synthetic oligonucleotide
aatgaattctccatgttcaaggg

SEQ ID NO: 2432 - DNA, 23 bp, Artificial Sequence
  Description of Artificial Sequence: Synthetic oligonucleotide
cccctgaatgcccttgaacatgg

SEQ ID NO: 2433 - DNA, 23 bp, Artificial Sequence
  Description of Artificial Sequence: Synthetic oligonucleotide
caatgaattctccatgttcaagg

SEQ ID NO: 2434 - DNA, 23 bp, Artificial Sequence
  Description of Artificial Sequence: Synthetic oligonucleotide
gttaggtcaagctgaatgtctgg

SEQ ID NO: 2435 - DNA, 23 bp, Artificial Sequence
  Description of Artificial Sequence: Synthetic oligonucleotide
gatggagaatttcacaggttagg

SEQ ID NO: 2436 - DNA, 23 bp, Artificial Sequence
  Description of Artificial Sequence: Synthetic oligonucleotide
aagaagatggagaatttcacagg

SEQ ID NO: 2437 - DNA, 23 bp, Artificial Sequence
  Description of Artificial Sequence: Synthetic oligonucleotide
ggaacactttataaagaagatgg

SEQ ID NO: 2438 - DNA, 23 bp, Artificial Sequence
  Description of Artificial Sequence: Synthetic oligonucleotide
tttccaggggaggcaaggaaggg

SEQ ID NO: 2439 - DNA, 23 bp, Artificial Sequence
  Description of Artificial Sequence: Synthetic oligonucleotide
ctttccaggggaggcaaggaagg

SEQ ID NO: 2440 - DNA, 23 bp, Artificial Sequence
  Description of Artificial Sequence: Synthetic oligonucleotide
tgacctttccaggggaggcaagg

SEQ ID NO: 2441 - DNA, 23 bp, Artificial Sequence
  Description of Artificial Sequence: Synthetic oligonucleotide
gttcccttccttgcctcccctgg

SEQ ID NO: 2442 - DNA, 23 bp, Artificial Sequence
  Description of Artificial Sequence: Synthetic oligonucleotide
accactgacctttccaggggagg

SEQ ID NO: 2443 - DNA, 23 bp, Artificial Sequence
  Description of Artificial Sequence: Synthetic oligonucleotide
cttccttgcctcccctggaaagg

SEQ ID NO: 2444 - DNA, 23 bp, Artificial Sequence
  Description of Artificial Sequence: Synthetic oligonucleotide
cacaccactgacctttccagggg

SEQ ID NO: 2445 - DNA, 23 bp, Artificial Sequence
  Description of Artificial Sequence: Synthetic oligonucleotide
acacaccactgacctttccaggg

SEQ ID NO: 2446 - DNA, 23 bp, Artificial Sequence
  Description of Artificial Sequence: Synthetic oligonucleotide
cacacaccactgacctttccagg

SEQ ID NO: 2447 - DNA, 23 bp, Artificial Sequence
  Description of Artificial Sequence: Synthetic oligonucleotide
gcctcccctggaaaggtcagtgg

SEQ ID NO: 2448 - DNA, 23 bp, Artificial Sequence
  Description of Artificial Sequence: Synthetic oligonucleotide
ctggaaaggtcagtggtgtgtgg

SEQ ID NO: 2449 - DNA, 23 bp, Artificial Sequence
  Description of Artificial Sequence: Synthetic oligonucleotide
agtgcaggtccagggctcagagg

SEQ ID NO: 2450 - DNA, 23 bp, Artificial Sequence
  Description of Artificial Sequence: Synthetic oligonucleotide
gcacagtgtcctctgagccctgg

SEQ ID NO: 2451 - DNA, 23 bp, Artificial Sequence
  Description of Artificial Sequence: Synthetic oligonucleotide
gaagccacagtgcaggtccaggg

SEQ ID NO: 2452 - DNA, 23 bp, Artificial Sequence
  Description of Artificial Sequence: Synthetic oligonucleotide
ggaagccacagtgcaggtccagg

SEQ ID NO: 2453 - DNA, 23 bp, Artificial Sequence
  Description of Artificial Sequence: Synthetic oligonucleotide
tgagccctggacctgcactgtgg

SEQ ID NO: 2454 - DNA, 23 bp, Artificial Sequence
  Description of Artificial Sequence: Synthetic oligonucleotide
acctctggaagccacagtgcagg

SEQ ID NO: 2455 - DNA, 23 bp, Artificial Sequence
  Description of Artificial Sequence: Synthetic oligonucleotide
acctgcactgtggcttccagagg

SEQ ID NO: 2456 - DNA, 23 bp, Artificial Sequence
  Description of Artificial Sequence: Synthetic oligonucleotide
tgcactgtggcttccagaggtgg

SEQ ID NO: 2457 - DNA, 23 bp, Artificial Sequence
  Description of Artificial Sequence: Synthetic oligonucleotide
catgtgggaactgccacctctgg

SEQ ID NO: 2458 - DNA, 23 bp, Artificial Sequence
  Description of Artificial Sequence: Synthetic oligonucleotide
cagaggtggcagttcccacatgg

SEQ ID NO: 2459 - DNA, 23 bp, Artificial Sequence
  Description of Artificial Sequence: Synthetic oligonucleotide
agaggtggcagttcccacatggg

SEQ ID NO: 2460 - DNA, 23 bp, Artificial Sequence
  Description of Artificial Sequence: Synthetic oligonucleotide
gaggtggcagttcccacatgggg

SEQ ID NO: 2461 - DNA, 23 bp, Artificial Sequence
  Description of Artificial Sequence: Synthetic oligonucleotide
tttattctagtaccccatgtggg

SEQ ID NO: 2462 - DNA, 23 bp, Artificial Sequence
  Description of Artificial Sequence: Synthetic oligonucleotide
atttattctagtaccccatgtgg

SEQ ID NO: 2463 - DNA, 23 bp, Artificial Sequence
  Description of Artificial Sequence: Synthetic oligonucleotide
acatggggtactagaataaatgg

SEQ ID NO: 2464 - DNA, 23 bp, Artificial Sequence
  Description of Artificial Sequence: Synthetic oligonucleotide
actagaataaatggcctatcagg

SEQ ID NO: 2465 - DNA, 23 bp, Artificial Sequence
  Description of Artificial Sequence: Synthetic oligonucleotide
caaagcacacacagcctgatagg

SEQ ID NO: 2466 - DNA, 23 bp, Artificial Sequence
  Description of Artificial Sequence: Synthetic oligonucleotide
ctatcaggctgtgtgtgctttgg

SEQ ID NO: 2467 - DNA, 23 bp, Artificial Sequence
  Description of Artificial Sequence: Synthetic oligonucleotide
tatcaggctgtgtgtgctttggg

SEQ ID NO: 2468 - DNA, 23 bp, Artificial Sequence
  Description of Artificial Sequence: Synthetic oligonucleotide
ggatcacatgtccccaccctagg

SEQ ID NO: 2469 - DNA, 23 bp, Artificial Sequence
  Description of Artificial Sequence: Synthetic oligonucleotide
ggaaccagggtcctagggtgggg

SEQ ID NO: 2470 - DNA, 23 bp, Artificial Sequence
  Description of Artificial Sequence: Synthetic oligonucleotide
tggaaccagggtcctagggtggg

SEQ ID NO: 2471 - DNA, 23 bp, Artificial Sequence
  Description of Artificial Sequence: Synthetic oligonucleotide
ttggaaccagggtcctagggtgg

SEQ ID NO: 2472 - DNA, 23 bp, Artificial Sequence
  Description of Artificial Sequence: Synthetic oligonucleotide
tggttggaaccagggtcctaggg

SEQ ID NO: 2473 - DNA, 23 bp, Artificial Sequence
  Description of Artificial Sequence: Synthetic oligonucleotide
atggttggaaccagggtcctagg

SEQ ID NO: 2474 - DNA, 23 bp, Artificial Sequence
  Description of Artificial Sequence: Synthetic oligonucleotide
atgtccccaccctaggaccctgg

SEQ ID NO: 2475 - DNA, 23 bp, Artificial Sequence
  Description of Artificial Sequence: Synthetic oligonucleotide
catgcgtatggttggaaccaggg

SEQ ID NO: 2476 - DNA, 23 bp, Artificial Sequence
  Description of Artificial Sequence: Synthetic oligonucleotide
acatgcgtatggttggaaccagg

SEQ ID NO: 2477 - DNA, 23 bp, Artificial Sequence
  Description of Artificial Sequence: Synthetic oligonucleotide
caagagaacatgcgtatggttgg

SEQ ID NO: 2478 - DNA, 23 bp, Artificial Sequence
  Description of Artificial Sequence: Synthetic oligonucleotide
gctccaagagaacatgcgtatgg

SEQ ID NO: 2479 - DNA, 23 bp, Artificial Sequence
  Description of Artificial Sequence: Synthetic oligonucleotide
caaccatacgcatgttctcttgg

SEQ ID NO: 2480 - DNA, 23 bp, Artificial Sequence
  Description of Artificial Sequence: Synthetic oligonucleotide
ggtggcttctctgctgttctggg

SEQ ID NO: 2481 - DNA, 23 bp, Artificial Sequence
  Description of Artificial Sequence: Synthetic oligonucleotide
tggtggcttctctgctgttctgg

SEQ ID NO: 2482 - DNA, 23 bp, Artificial Sequence
  Description of Artificial Sequence: Synthetic oligonucleotide
cagcagagaagccaccagtgtgg

SEQ ID NO: 2483 - DNA, 23 bp, Artificial Sequence
  Description of Artificial Sequence: Synthetic oligonucleotide
gacttctgtgtccacactggtgg

SEQ ID NO: 2484 - DNA, 23 bp, Artificial Sequence
  Description of Artificial Sequence: Synthetic oligonucleotide
cttgacttctgtgtccacactgg

SEQ ID NO: 2485 - DNA, 23 bp, Artificial Sequence
  Description of Artificial Sequence: Synthetic oligonucleotide
cagtgtggacacagaagtcaagg

SEQ ID NO: 2486 - DNA, 23 bp, Artificial Sequence
  Description of Artificial Sequence: Synthetic oligonucleotide
agtgtggacacagaagtcaaggg

SEQ ID NO: 2487 - DNA, 23 bp, Artificial Sequence
  Description of Artificial Sequence: Synthetic oligonucleotide
caagggtctgatttccagcctgg

SEQ ID NO: 2488 - DNA, 23 bp, Artificial Sequence
  Description of Artificial Sequence: Synthetic oligonucleotide
agagcagtcagaagccaggctgg

SEQ ID NO: 2489 - DNA, 23 bp, Artificial Sequence
  Description of Artificial Sequence: Synthetic oligonucleotide
ccccagagcagtcagaagccagg

SEQ ID NO: 2490 - DNA, 23 bp, Artificial Sequence
  Description of Artificial Sequence: Synthetic oligonucleotide
agcctggcttctgactgctctgg

SEQ ID NO: 2491 - DNA, 23 bp, Artificial Sequence
  Description of Artificial Sequence: Synthetic oligonucleotide
gcctggcttctgactgctctggg

SEQ ID NO: 2492 - DNA, 23 bp, Artificial Sequence
  Description of Artificial Sequence: Synthetic oligonucleotide
cctggcttctgactgctctgggg

SEQ ID NO: 2493 - DNA, 23 bp, Artificial Sequence
  Description of Artificial Sequence: Synthetic oligonucleotide
tctgactgctctggggccgcagg

SEQ ID NO: 2494 - DNA, 23 bp, Artificial Sequence
  Description of Artificial Sequence: Synthetic oligonucleotide
gggaaggaaccgtattcctgcgg

SEQ ID NO: 2495 - DNA, 23 bp, Artificial Sequence
  Description of Artificial Sequence: Synthetic oligonucleotide
gctctggggccgcaggaatacgg

SEQ ID NO: 2496 - DNA, 23 bp, Artificial Sequence
  Description of Artificial Sequence: Synthetic oligonucleotide
tgcctgctgggcatgggggaagg

SEQ ID NO: 2497 - DNA, 23 bp, Artificial Sequence
  Description of Artificial Sequence: Synthetic oligonucleotide
caaatgcctgctgggcatggggg

SEQ ID NO: 2498 - DNA, 23 bp, Artificial Sequence
  Description of Artificial Sequence: Synthetic oligonucleotide
acaaatgcctgctgggcatgggg

SEQ ID NO: 2499 - DNA, 23 bp, Artificial Sequence
  Description of Artificial Sequence: Synthetic oligonucleotide
gacaaatgcctgctgggcatggg

SEQ ID NO: 2500 - DNA, 23 bp, Artificial Sequence
  Description of Artificial Sequence: Synthetic oligonucleotide
agacaaatgcctgctgggcatgg

SEQ ID NO: 2501 - DNA, 23 bp, Artificial Sequence
  Description of Artificial Sequence: Synthetic oligonucleotide
ttccttcccccatgcccagcagg

SEQ ID NO: 2502 - DNA, 23 bp, Artificial Sequence
  Description of Artificial Sequence: Synthetic oligonucleotide
ttgtaagacaaatgcctgctggg

SEQ ID NO: 2503 - DNA, 23 bp, Artificial Sequence
  Description of Artificial Sequence: Synthetic oligonucleotide
gttgtaagacaaatgcctgctgg

SEQ ID NO: 2504 - DNA, 23 bp, Artificial Sequence
  Description of Artificial Sequence: Synthetic oligonucleotide
gcaggcatttgtcttacaactgg

SEQ ID NO: 2505 - DNA, 23 bp, Artificial Sequence
  Description of Artificial Sequence: Synthetic oligonucleotide
ggcatttgtcttacaactggagg

SEQ ID NO: 2506 - DNA, 23 bp, Artificial Sequence
  Description of Artificial Sequence: Synthetic oligonucleotide
gcatttgtcttacaactggaggg

SEQ ID NO: 2507 - DNA, 23 bp, Artificial Sequence
  Description of Artificial Sequence: Synthetic oligonucleotide
catttgtcttacaactggagggg

SEQ ID NO: 2508 - DNA, 23 bp, Artificial Sequence
  Description of Artificial Sequence: Synthetic oligonucleotide
tgtcttacaactggaggggaagg

SEQ ID NO: 2509 - DNA, 23 bp, Artificial Sequence
  Description of Artificial Sequence: Synthetic oligonucleotide
aggggaaggcatgttcctcttgg

SEQ ID NO: 2510 - DNA, 23 bp, Artificial Sequence
  Description of Artificial Sequence: Synthetic oligonucleotide
cctgagcagtccttgccaagagg

SEQ ID NO: 2511 - DNA, 23 bp, Artificial Sequence
  Description of Artificial Sequence: Synthetic oligonucleotide
aaggcatgttcctcttggcaagg

SEQ ID NO: 2512 - DNA, 23 bp, Artificial Sequence
  Description of Artificial Sequence: Synthetic oligonucleotide
cctcttggcaaggactgctcagg

SEQ ID NO: 2513 - DNA, 23 bp, Artificial Sequence
  Description of Artificial Sequence: Synthetic oligonucleotide
cttggcaaggactgctcaggagg

SEQ ID NO: 2514 - DNA, 23 bp, Artificial Sequence
  Description of Artificial Sequence: Synthetic oligonucleotide
aaggactgctcaggaggaagtgg

SEQ ID NO: 2515 - DNA, 23 bp, Artificial Sequence
  Description of Artificial Sequence: Synthetic oligonucleotide
gactgctcaggaggaagtggagg

SEQ ID NO: 2516 - DNA, 23 bp, Artificial Sequence
  Description of Artificial Sequence: Synthetic oligonucleotide
gctcaggaggaagtggaggcagg

SEQ ID NO: 2517 - DNA, 23 bp, Artificial Sequence
  Description of Artificial Sequence: Synthetic oligonucleotide
tggaggcaggctgccctgtcagg

SEQ ID NO: 2518 - DNA, 23 bp, Artificial Sequence
  Description of Artificial Sequence: Synthetic oligonucleotide
ggaggcaggctgccctgtcaggg

SEQ ID NO: 2519 - DNA, 23 bp, Artificial Sequence
  Description of Artificial Sequence: Synthetic oligonucleotide
tcaaggcaaaaaccctgacaggg

SEQ ID NO: 2520 - DNA, 23 bp, Artificial Sequence
  Description of Artificial Sequence: Synthetic oligonucleotide
atcaaggcaaaaaccctgacagg

SEQ ID NO: 2521 - DNA, 23 bp, Artificial Sequence
  Description of Artificial Sequence: Synthetic oligonucleotide
aggaagttctccttgaatcaagg

SEQ ID NO: 2522 - DNA, 23 bp, Artificial Sequence
  Description of Artificial Sequence: Synthetic oligonucleotide
agggtttttgccttgattcaagg

SEQ ID NO: 2523 - DNA, 23 bp, Artificial Sequence
  Description of Artificial Sequence: Synthetic oligonucleotide
cacttgtatcctttgtggttagg

SEQ ID NO: 2524 - DNA, 23 bp, Artificial Sequence
  Description of Artificial Sequence: Synthetic oligonucleotide
ggagaacttcctaaccacaaagg

SEQ ID NO: 2525 - DNA, 23 bp, Artificial Sequence
  Description of Artificial Sequence: Synthetic oligonucleotide
actcccacttgtatcctttgtgg

SEQ ID NO: 2526 - DNA, 23 bp, Artificial Sequence
  Description of Artificial Sequence: Synthetic oligonucleotide
ctaaccacaaaggatacaagtgg

SEQ ID NO: 2527 - DNA, 23 bp, Artificial Sequence
  Description of Artificial Sequence: Synthetic oligonucleotide
taaccacaaaggatacaagtggg

SEQ ID NO: 2528 - DNA, 23 bp, Artificial Sequence
  Description of Artificial Sequence: Synthetic oligonucleotide
aaaggatacaagtgggagtgagg

SEQ ID NO: 2529 - DNA, 23 bp, Artificial Sequence
  Description of Artificial Sequence: Synthetic oligonucleotide
ggatacaagtgggagtgaggcgg

SEQ ID NO: 2530 - DNA, 23 bp, Artificial Sequence
  Description of Artificial Sequence: Synthetic oligonucleotide
gtgttggagatctctagggaggg

SEQ ID NO: 2531 - DNA, 23 bp, Artificial Sequence
  Description of Artificial Sequence: Synthetic oligonucleotide
tgtgttggagatctctagggagg

SEQ ID NO: 2532 - DNA, 23 bp, Artificial Sequence
  Description of Artificial Sequence: Synthetic oligonucleotide
ctctgtgttggagatctctaggg

SEQ ID NO: 2533 - DNA, 23 bp, Artificial Sequence
  Description of Artificial Sequence: Synthetic oligonucleotide
tctctgtgttggagatctctagg

SEQ ID NO: 2534 - DNA, 23 bp, Artificial Sequence
  Description of Artificial Sequence: Synthetic oligonucleotide
gcgtgtttgtctctctgtgttgg

SEQ ID NO: 2535 - DNA, 23 bp, Artificial Sequence
  Description of Artificial Sequence: Synthetic oligonucleotide
acacagagagacaaacacgctgg

SEQ ID NO: 2536 - DNA, 23 bp, Artificial Sequence
  Description of Artificial Sequence: Synthetic oligonucleotide
cacagagagacaaacacgctggg

SEQ ID NO: 2537 - DNA, 23 bp, Artificial Sequence
  Description of Artificial Sequence: Synthetic oligonucleotide
acagagagacaaacacgctgggg

SEQ ID NO: 2538 - DNA, 23 bp, Artificial Sequence
  Description of Artificial Sequence: Synthetic oligonucleotide
agagacaaacacgctggggctgg

SEQ ID NO: 2539 - DNA, 23 bp, Artificial Sequence
  Description of Artificial Sequence: Synthetic oligonucleotide
acaaacacgctggggctggctgg

SEQ ID NO: 2540 - DNA, 23 bp, Artificial Sequence
  Description of Artificial Sequence: Synthetic oligonucleotide
tggggctggctggcactgacagg

SEQ ID NO: 2541 - DNA, 23 bp, Artificial Sequence
  Description of Artificial Sequence: Synthetic oligonucleotide
ctggcactgacaggcctcgcagg

SEQ ID NO: 2542 - DNA, 23 bp, Artificial Sequence
  Description of Artificial Sequence: Synthetic oligonucleotide
aacagccatccacacctgcgagg

SEQ ID NO: 2543 - DNA, 23 bp, Artificial Sequence
  Description of Artificial Sequence: Synthetic oligonucleotide
actgacaggcctcgcaggtgtgg

SEQ ID NO: 2544 - DNA, 23 bp, Artificial Sequence
  Description of Artificial Sequence: Synthetic oligonucleotide
acaggcctcgcaggtgtggatgg

SEQ ID NO: 2545 - DNA, 23 bp, Artificial Sequence
  Description of Artificial Sequence: Synthetic oligonucleotide
aggtgtggatggctgttagctgg

SEQ ID NO: 2546 - DNA, 23 bp, Artificial Sequence
  Description of Artificial Sequence: Synthetic oligonucleotide
ggtgtggatggctgttagctggg

SEQ ID NO: 2547 - DNA, 23 bp, Artificial Sequence
  Description of Artificial Sequence: Synthetic oligonucleotide
ccagaagaaaagcatgggagagg

SEQ ID NO: 2548 - DNA, 23 bp, Artificial Sequence
  Description of Artificial Sequence: Synthetic oligonucleotide
gcaacccagaagaaaagcatggg

SEQ ID NO: 2549 - DNA, 23 bp, Artificial Sequence
  Description of Artificial Sequence: Synthetic oligonucleotide
agcaacccagaagaaaagcatgg

SEQ ID NO: 2550 - DNA, 23 bp, Artificial Sequence
  Description of Artificial Sequence: Synthetic oligonucleotide
cctctcccatgcttttcttctgg

SEQ ID NO: 2551 - DNA, 23 bp, Artificial Sequence
  Description of Artificial Sequence: Synthetic oligonucleotide
ctctcccatgcttttcttctggg

SEQ ID NO: 2552 - DNA, 23 bp, Artificial Sequence
  Description of Artificial Sequence: Synthetic oligonucleotide
ttttcttctgggttgctcgaagg

SEQ ID NO: 2553 - DNA, 23 bp, Artificial Sequence
  Description of Artificial Sequence: Synthetic oligonucleotide
cttctgggttgctcgaaggacgg

SEQ ID NO: 2554 - DNA, 23 bp, Artificial Sequence
  Description of Artificial Sequence: Synthetic oligonucleotide
ttctgggttgctcgaaggacggg

SEQ ID NO: 2555 - DNA, 23 bp, Artificial Sequence
  Description of Artificial Sequence: Synthetic oligonucleotide
tctgggttgctcgaaggacgggg

SEQ ID NO: 2556 - DNA, 23 bp, Artificial Sequence
  Description of Artificial Sequence: Synthetic oligonucleotide
ctgggttgctcgaaggacggggg

SEQ ID NO: 2557 - DNA, 23 bp, Artificial Sequence
  Description of Artificial Sequence: Synthetic oligonucleotide
tcacgtgctgccaactatgtggg

SEQ ID NO: 2558 - DNA, 23 bp, Artificial Sequence
  Description of Artificial Sequence: Synthetic oligonucleotide
aaatgatgttcccacatagttgg

SEQ ID NO: 2559 - DNA, 23 bp, Artificial Sequence
  Description of Artificial Sequence: Synthetic oligonucleotide
ttcacgtgctgccaactatgtgg

SEQ ID NO: 2560 - DNA, 23 bp, Artificial Sequence
  Description of Artificial Sequence: Synthetic oligonucleotide
gtaagaggaggtgatgcaaaggg

SEQ ID NO: 2561 - DNA, 23 bp, Artificial Sequence
  Description of Artificial Sequence: Synthetic oligonucleotide
agtaagaggaggtgatgcaaagg

SEQ ID NO: 2562 - DNA, 23 bp, Artificial Sequence
  Description of Artificial Sequence: Synthetic oligonucleotide
caaatctaaacagtaagaggagg

SEQ ID NO: 2563 - DNA, 23 bp, Artificial Sequence
  Description of Artificial Sequence: Synthetic oligonucleotide
taccaaatctaaacagtaagagg

SEQ ID NO: 2564 - DNA, 23 bp, Artificial Sequence
  Description of Artificial Sequence: Synthetic oligonucleotide
ctcctcttactgtttagatttgg

SEQ ID NO: 2565 - DNA, 23 bp, Artificial Sequence
  Description of Artificial Sequence: Synthetic oligonucleotide
atggagggtcagaagagggaagg

SEQ ID NO: 2566 - DNA, 23 bp, Artificial Sequence
  Description of Artificial Sequence: Synthetic oligonucleotide
caaaatggagggtcagaagaggg

SEQ ID NO: 2567 - DNA, 23 bp, Artificial Sequence
  Description of Artificial Sequence: Synthetic oligonucleotide
gcaaaatggagggtcagaagagg

SEQ ID NO: 2568 - DNA, 23 bp, Artificial Sequence
  Description of Artificial Sequence: Synthetic oligonucleotide
ggaaagatcggcaaaatggaggg

SEQ ID NO: 2569 - DNA, 23 bp, Artificial Sequence
  Description of Artificial Sequence: Synthetic oligonucleotide
aggaaagatcggcaaaatggagg

SEQ ID NO: 2570 - DNA, 23 bp, Artificial Sequence
  Description of Artificial Sequence: Synthetic oligonucleotide
agaaggaaagatcggcaaaatgg

SEQ ID NO: 2571 - DNA, 23 bp, Artificial Sequence
  Description of Artificial Sequence: Synthetic oligonucleotide
gtgttataagaaggaaagatcgg

SEQ ID NO: 2572 - DNA, 23 bp, Artificial Sequence
  Description of Artificial Sequence: Synthetic oligonucleotide
agtaagtatgtgttataagaagg

SEQ ID NO: 2573 - DNA, 23 bp, Artificial Sequence
  Description of Artificial Sequence: Synthetic oligonucleotide
tcttataacacatacttactagg

SEQ ID NO: 2574 - DNA, 23 bp, Artificial Sequence
  Description of Artificial Sequence: Synthetic oligonucleotide
aggcccacccgggaagtagcagg

SEQ ID NO: 2575 - DNA, 23 bp, Artificial Sequence
  Description of Artificial Sequence: Synthetic oligonucleotide
actaggtacctgctacttcccgg

SEQ ID NO: 2576 - DNA, 23 bp, Artificial Sequence
  Description of Artificial Sequence: Synthetic oligonucleotide
ctaggtacctgctacttcccggg

SEQ ID NO: 2577 - DNA, 23 bp, Artificial Sequence
  Description of Artificial Sequence: Synthetic oligonucleotide
ggtacctgctacttcccgggtgg

SEQ ID NO: 2578 - DNA, 23 bp, Artificial Sequence
  Description of Artificial Sequence: Synthetic oligonucleotide
gtacctgctacttcccgggtggg

SEQ ID NO: 2579 - DNA, 23 bp, Artificial Sequence
  Description of Artificial Sequence: Synthetic oligonucleotide
cctggcacataggcccacccggg

SEQ ID NO: 2580 - DNA, 23 bp, Artificial Sequence
  Description of Artificial Sequence: Synthetic oligonucleotide
tcctggcacataggcccacccgg

SEQ ID NO: 2581 - DNA, 23 bp, Artificial Sequence
  Description of Artificial Sequence: Synthetic oligonucleotide
cctctatactcctggcacatagg

SEQ ID NO: 2582 - DNA, 23 bp, Artificial Sequence
  Description of Artificial Sequence: Synthetic oligonucleotide
cccgggtgggcctatgtgccagg

SEQ ID NO: 2583 - DNA, 23 bp, Artificial Sequence
  Description of Artificial Sequence: Synthetic oligonucleotide
cttgttcacctctatactcctgg

SEQ ID NO: 2584 - DNA, 23 bp, Artificial Sequence
  Description of Artificial Sequence: Synthetic oligonucleotide
cctatgtgccaggagtatagagg

SEQ ID NO: 2585 - DNA, 23 bp, Artificial Sequence
  Description of Artificial Sequence: Synthetic oligonucleotide
caggagtatagaggtgaacaagg

SEQ ID NO: 2586 - DNA, 23 bp, Artificial Sequence
  Description of Artificial Sequence: Synthetic oligonucleotide
agtatagaggtgaacaaggaagg

SEQ ID NO: 2587 - DNA, 23 bp, Artificial Sequence
  Description of Artificial Sequence: Synthetic oligonucleotide
agtagagctaatactctatctgg

SEQ ID NO: 2588 - DNA, 23 bp, Artificial Sequence
  Description of Artificial Sequence: Synthetic oligonucleotide
agacaacaaacaaatcaacaagg

SEQ ID NO: 2589 - DNA, 23 bp, Artificial Sequence
  Description of Artificial Sequence: Synthetic oligonucleotide
aacaaatcaacaaggtagccagg

SEQ ID NO: 2590 - DNA, 23 bp, Artificial Sequence
  Description of Artificial Sequence: Synthetic oligonucleotide
acaaatcaacaaggtagccaggg

SEQ ID NO: 2591 - DNA, 23 bp, Artificial Sequence
  Description of Artificial Sequence: Synthetic oligonucleotide
caaatcaacaaggtagccagggg

SEQ ID NO: 2592 - DNA, 23 bp, Artificial Sequence
  Description of Artificial Sequence: Synthetic oligonucleotide
acataaattatcacagcccctgg

SEQ ID NO: 2593 - DNA, 23 bp, Artificial Sequence
  Description of Artificial Sequence: Synthetic oligonucleotide
ctgtgataatttatgtcaagtgg

SEQ ID NO: 2594 - DNA, 23 bp, Artificial Sequence
  Description of Artificial Sequence: Synthetic oligonucleotide
tgtgataatttatgtcaagtggg

SEQ ID NO: 2595 - DNA, 23 bp, Artificial Sequence
  Description of Artificial Sequence: Synthetic oligonucleotide
ataatttatgtcaagtgggcagg

SEQ ID NO: 2596 - DNA, 23 bp, Artificial Sequence
  Description of Artificial Sequence: Synthetic oligonucleotide
tgtcaagtgggcaggtaaatcgg

SEQ ID NO: 2597 - DNA, 23 bp, Artificial Sequence
  Description of Artificial Sequence: Synthetic oligonucleotide
gtcaagtgggcaggtaaatcggg

SEQ ID NO: 2598 - DNA, 23 bp, Artificial Sequence
  Description of Artificial Sequence: Synthetic oligonucleotide
atcgggagtgacagtagtgcagg

SEQ ID NO: 2599 - DNA, 23 bp, Artificial Sequence
  Description of Artificial Sequence: Synthetic oligonucleotide
tcgggagtgacagtagtgcaggg

SEQ ID NO: 2600 - DNA, 23 bp, Artificial Sequence
  Description of Artificial Sequence: Synthetic oligonucleotide
ggagtgacagtagtgcagggagg

SEQ ID NO: 2601 - DNA, 23 bp, Artificial Sequence
  Description of Artificial Sequence: Synthetic oligonucleotide
gacagtagtgcagggaggattgg

SEQ ID NO: 2602 - DNA, 23 bp, Artificial Sequence
  Description of Artificial Sequence: Synthetic oligonucleotide
gcagggaggattggaaagtcagg

SEQ ID NO: 2603 - DNA, 23 bp, Artificial Sequence
  Description of Artificial Sequence: Synthetic oligonucleotide
cagggaggattggaaagtcaggg

SEQ ID NO: 2604 - DNA, 23 bp, Artificial Sequence
  Description of Artificial Sequence: Synthetic oligonucleotide
gaaagtcagggagttctctctgg

SEQ ID NO: 2605 - DNA, 23 bp, Artificial Sequence
  Description of Artificial Sequence: Synthetic oligonucleotide
agtcagggagttctctctggagg

SEQ ID NO: 2606 - DNA, 23 bp, Artificial Sequence
  Description of Artificial Sequence: Synthetic oligonucleotide
cagggagttctctctggaggagg

SEQ ID NO: 2607 - DNA, 23 bp, Artificial Sequence
  Description of Artificial Sequence: Synthetic oligonucleotide
ggagttctctctggaggaggtgg

SEQ ID NO: 2608 - DNA, 23 bp, Artificial Sequence
  Description of Artificial Sequence: Synthetic oligonucleotide
gcttttgatctgcagcctaaagg

SEQ ID NO: 2609 - DNA, 23 bp, Artificial Sequence
  Description of Artificial Sequence: Synthetic oligonucleotide
tggacccattctcatcctttagg

SEQ ID NO: 2610 - DNA, 23 bp, Artificial Sequence
  Description of Artificial Sequence: Synthetic oligonucleotide
tgcagcctaaaggatgagaatgg

SEQ ID NO: 2611 - DNA, 23 bp, Artificial Sequence
  Description of Artificial Sequence: Synthetic oligonucleotide
gcagcctaaaggatgagaatggg

SEQ ID NO: 2612 - DNA, 23 bp, Artificial Sequence
  Description of Artificial Sequence: Synthetic oligonucleotide
tgccccagcattttgtataatgg

SEQ ID NO: 2613 - DNA, 23 bp, Artificial Sequence
  Description of Artificial Sequence: Synthetic oligonucleotide
gggtccattatacaaaatgctgg

SEQ ID NO: 2614 - DNA, 23 bp, Artificial Sequence
  Description of Artificial Sequence: Synthetic oligonucleotide
ggtccattatacaaaatgctggg

SEQ ID NO: 2615 - DNA, 23 bp, Artificial Sequence
  Description of Artificial Sequence: Synthetic oligonucleotide
gtccattatacaaaatgctgggg

SEQ ID NO: 2616 - DNA, 23 bp, Artificial Sequence
  Description of Artificial Sequence: Synthetic oligonucleotide
ggcaagagcacacccagtagagg

SEQ ID NO: 2617 - DNA, 23 bp, Artificial Sequence
  Description of Artificial Sequence: Synthetic oligonucleotide
gcaagagcacacccagtagaggg

SEQ ID NO: 2618 - DNA, 23 bp, Artificial Sequence
  Description of Artificial Sequence: Synthetic oligonucleotide
ctattactctcccctctactggg

SEQ ID NO: 2619 - DNA, 23 bp, Artificial Sequence
  Description of Artificial Sequence: Synthetic oligonucleotide
caagagcacacccagtagagggg

SEQ ID NO: 2620 - DNA, 23 bp, Artificial Sequence
  Description of Artificial Sequence: Synthetic oligonucleotide
gctattactctcccctctactgg

SEQ ID NO: 2621 - DNA, 23 bp, Artificial Sequence
  Description of Artificial Sequence: Synthetic oligonucleotide
agaggggagagtaatagcaaagg

SEQ ID NO: 2622 - DNA, 23 bp, Artificial Sequence
  Description of Artificial Sequence: Synthetic oligonucleotide
gagagtaatagcaaaggctcagg

SEQ ID NO: 2623 - DNA, 23 bp, Artificial Sequence
  Description of Artificial Sequence: Synthetic oligonucleotide
agagtaatagcaaaggctcaggg

SEQ ID NO: 2624 - DNA, 23 bp, Artificial Sequence
  Description of Artificial Sequence: Synthetic oligonucleotide
taatagcaaaggctcagggcagg

SEQ ID NO: 2625 - DNA, 23 bp, Artificial Sequence
  Description of Artificial Sequence: Synthetic oligonucleotide
agcaaaggctcagggcaggaagg

SEQ ID NO: 2626 - DNA, 23 bp, Artificial Sequence
  Description of Artificial Sequence: Synthetic oligonucleotide
gcaaaggctcagggcaggaaggg

SEQ ID NO: 2627 - DNA, 23 bp, Artificial Sequence
  Description of Artificial Sequence: Synthetic oligonucleotide
ggctcagggcaggaagggcaagg

SEQ ID NO: 2628 - DNA, 23 bp, Artificial Sequence
  Description of Artificial Sequence: Synthetic oligonucleotide
gctcagggcaggaagggcaaggg

SEQ ID NO: 2629 - DNA, 23 bp, Artificial Sequence
  Description of Artificial Sequence: Synthetic oligonucleotide
gggcaggaagggcaagggagagg

SEQ ID NO: 2630 - DNA, 23 bp, Artificial Sequence
  Description of Artificial Sequence: Synthetic oligonucleotide
aagggcaagggagaggccagtgg

SEQ ID NO: 2631 - DNA, 23 bp, Artificial Sequence
  Description of Artificial Sequence: Synthetic oligonucleotide
agggcaagggagaggccagtggg

SEQ ID NO: 2632 - DNA, 23 bp, Artificial Sequence
  Description of Artificial Sequence: Synthetic oligonucleotide
tcacatgtgacctcacccactgg

SEQ ID NO: 2633 - DNA, 23 bp, Artificial Sequence
  Description of Artificial Sequence: Synthetic oligonucleotide
aagggagaggccagtgggtgagg

SEQ ID NO: 2634 - DNA, 23 bp, Artificial Sequence
  Description of Artificial Sequence: Synthetic oligonucleotide
gtgggtgaggtcacatgtgaagg

SEQ ID NO: 2635 - DNA, 23 bp, Artificial Sequence
  Description of Artificial Sequence: Synthetic oligonucleotide
tgggtgaggtcacatgtgaaggg

SEQ ID NO: 2636 - DNA, 23 bp, Artificial Sequence
  Description of Artificial Sequence: Synthetic oligonucleotide
cacatgtgaagggcatacaatgg

SEQ ID NO: 2637 - DNA, 23 bp, Artificial Sequence
  Description of Artificial Sequence: Synthetic oligonucleotide
acatgtgaagggcatacaatggg

SEQ ID NO: 2638 - DNA, 23 bp, Artificial Sequence
  Description of Artificial Sequence: Synthetic oligonucleotide
gcatacaatgggcaaagacaagg

SEQ ID NO: 2639 - DNA, 23 bp, Artificial Sequence
  Description of Artificial Sequence: Synthetic oligonucleotide
gggcaaagacaaggccagagtgg

SEQ ID NO: 2640 - DNA, 23 bp, Artificial Sequence
  Description of Artificial Sequence: Synthetic oligonucleotide
aggattgggcctggccactctgg

SEQ ID NO: 2641 - DNA, 23 bp, Artificial Sequence
  Description of Artificial Sequence: Synthetic oligonucleotide
aagacaaggccagagtggccagg

SEQ ID NO: 2642 - DNA, 23 bp, Artificial Sequence
  Description of Artificial Sequence: Synthetic oligonucleotide
aagtcctggaggattgggcctgg

SEQ ID NO: 2643 - DNA, 23 bp, Artificial Sequence
  Description of Artificial Sequence: Synthetic oligonucleotide
tctgcaagtcctggaggattggg

SEQ ID NO: 2644 - DNA, 23 bp, Artificial Sequence
  Description of Artificial Sequence: Synthetic oligonucleotide
gtctgcaagtcctggaggattgg

SEQ ID NO: 2645 - DNA, 23 bp, Artificial Sequence
  Description of Artificial Sequence: Synthetic oligonucleotide
gtggccaggcccaatcctccagg

SEQ ID NO: 2646 - DNA, 23 bp, Artificial Sequence
  Description of Artificial Sequence: Synthetic oligonucleotide
cccaggtctgcaagtcctggagg

SEQ ID NO: 2647 - DNA, 23 bp, Artificial Sequence
  Description of Artificial Sequence: Synthetic oligonucleotide
tttcccaggtctgcaagtcctgg

SEQ ID NO: 2648 - DNA, 23 bp, Artificial Sequence
  Description of Artificial Sequence: Synthetic oligonucleotide
tcctccaggacttgcagacctgg

SEQ ID NO: 2649 - DNA, 23 bp, Artificial Sequence
  Description of Artificial Sequence: Synthetic oligonucleotide
cctccaggacttgcagacctggg

SEQ ID NO: 2650 - DNA, 23 bp, Artificial Sequence
  Description of Artificial Sequence: Synthetic oligonucleotide
atggagatgcactctttcccagg

SEQ ID NO: 2651 - DNA, 23 bp, Artificial Sequence
  Description of Artificial Sequence: Synthetic oligonucleotide
gaaagagtgcatctccatcctgg

SEQ ID NO: 2652 - DNA, 23 bp, Artificial Sequence
  Description of Artificial Sequence: Synthetic oligonucleotide
aaagagtgcatctccatcctggg

SEQ ID NO: 2653 - DNA, 23 bp, Artificial Sequence
  Description of Artificial Sequence: Synthetic oligonucleotide
gtttcctgctgctcccaggatgg

SEQ ID NO: 2654 - DNA, 23 bp, Artificial Sequence
  Description of Artificial Sequence: Synthetic oligonucleotide
agtggtttcctgctgctcccagg

SEQ ID NO: 2655 - DNA, 23 bp, Artificial Sequence
  Description of Artificial Sequence: Synthetic oligonucleotide
atctccatcctgggagcagcagg

SEQ ID NO: 2656 - DNA, 23 bp, Artificial Sequence
  Description of Artificial Sequence: Synthetic oligonucleotide
ggagcagcaggaaaccactcagg

SEQ ID NO: 2657 - DNA, 23 bp, Artificial Sequence
  Description of Artificial Sequence: Synthetic oligonucleotide
ggatcttctaaaggcctgagtgg

SEQ ID NO: 2658 - DNA, 23 bp, Artificial Sequence
  Description of Artificial Sequence: Synthetic oligonucleotide
ctgccagaaggatcttctaaagg

SEQ ID NO: 2659 - DNA, 23 bp, Artificial Sequence
  Description of Artificial Sequence: Synthetic oligonucleotide
aggcctttagaagatccttctgg

SEQ ID NO: 2660 - DNA, 23 bp, Artificial Sequence
  Description of Artificial Sequence: Synthetic oligonucleotide
ttctctacacagctgccagaagg

SEQ ID NO: 2661 - DNA, 23 bp, Artificial Sequence
  Description of Artificial Sequence: Synthetic oligonucleotide
tctggcagctgtgtagagaatgg

SEQ ID NO: 2662 - DNA, 23 bp, Artificial Sequence
  Description of Artificial Sequence: Synthetic oligonucleotide
ctggcagctgtgtagagaatggg

SEQ ID NO: 2663 - DNA, 23 bp, Artificial Sequence
  Description of Artificial Sequence: Synthetic oligonucleotide
gcagctgtgtagagaatgggtgg

SEQ ID NO: 2664 - DNA, 23 bp, Artificial Sequence
  Description of Artificial Sequence: Synthetic oligonucleotide
tacatgagcccatgcatggaagg

SEQ ID NO: 2665 - DNA, 23 bp, Artificial Sequence
  Description of Artificial Sequence: Synthetic oligonucleotide
tggtgtgatccttccatgcatgg

SEQ ID NO: 2666 - DNA, 23 bp, Artificial Sequence
  Description of Artificial Sequence: Synthetic oligonucleotide
ggtgtgatccttccatgcatggg

SEQ ID NO: 2667 - DNA, 23 bp, Artificial Sequence
  Description of Artificial Sequence: Synthetic oligonucleotide
cacgtacatgagcccatgcatgg

SEQ ID NO: 2668 - DNA, 23 bp, Artificial Sequence
  Description of Artificial Sequence: Synthetic oligonucleotide
cactgtcactcgacagttactgg

SEQ ID NO: 2669 - DNA, 23 bp, Artificial Sequence
  Description of Artificial Sequence: Synthetic oligonucleotide
aactgtcgagtgacagtgtgagg

SEQ ID NO: 2670 - DNA, 23 bp, Artificial Sequence
  Description of Artificial Sequence: Synthetic oligonucleotide
tgtcgagtgacagtgtgaggagg

SEQ ID NO: 2671 - DNA, 23 bp, Artificial Sequence
  Description of Artificial Sequence: Synthetic oligonucleotide
gtcgagtgacagtgtgaggaggg

SEQ ID NO: 2672 - DNA, 23 bp, Artificial Sequence
  Description of Artificial Sequence: Synthetic oligonucleotide
gtctgctgtgcctacactcatgg

SEQ ID NO: 2673 - DNA, 23 bp, Artificial Sequence
  Description of Artificial Sequence: Synthetic oligonucleotide
gggctgcaagccatgagtgtagg

SEQ ID NO: 2674 - DNA, 23 bp, Artificial Sequence
  Description of Artificial Sequence: Synthetic oligonucleotide
cagacagactcacctttgtctgg

SEQ ID NO: 2675 - DNA, 23 bp, Artificial Sequence
  Description of Artificial Sequence: Synthetic oligonucleotide
cccatctcaccgccagacaaagg

SEQ ID NO: 2676 - DNA, 23 bp, Artificial Sequence
  Description of Artificial Sequence: Synthetic oligonucleotide
acagactcacctttgtctggcgg

SEQ ID NO: 2677 - DNA, 23 bp, Artificial Sequence
  Description of Artificial Sequence: Synthetic oligonucleotide
acctttgtctggcggtgagatgg

SEQ ID NO: 2678 - DNA, 23 bp, Artificial Sequence
  Description of Artificial Sequence: Synthetic oligonucleotide
cctttgtctggcggtgagatggg

SEQ ID NO: 2679 - DNA, 23 bp, Artificial Sequence
  Description of Artificial Sequence: Synthetic oligonucleotide
ctttgtctggcggtgagatgggg

SEQ ID NO: 2680 - DNA, 23 bp, Artificial Sequence
  Description of Artificial Sequence: Synthetic oligonucleotide
tgtctggcggtgagatggggtgg

SEQ ID NO: 2681 - DNA, 23 bp, Artificial Sequence
  Description of Artificial Sequence: Synthetic oligonucleotide
gtctggcggtgagatggggtggg

SEQ ID NO: 2682 - DNA, 23 bp, Artificial Sequence
  Description of Artificial Sequence: Synthetic oligonucleotide
atttctttgggaggtcaacttgg

SEQ ID NO: 2683 - DNA, 23 bp, Artificial Sequence
  Description of Artificial Sequence: Synthetic oligonucleotide
taaaatatcatttctttgggagg

SEQ ID NO: 2684 - DNA, 23 bp, Artificial Sequence
  Description of Artificial Sequence: Synthetic oligonucleotide
cactaaaatatcatttctttggg

SEQ ID NO: 2685 - DNA, 23 bp, Artificial Sequence
  Description of Artificial Sequence: Synthetic oligonucleotide
ccactaaaatatcatttctttgg

SEQ ID NO: 2686 - DNA, 23 bp, Artificial Sequence
  Description of Artificial Sequence: Synthetic oligonucleotide
ccaaagaaatgatattttagtgg

SEQ ID NO: 2687 - DNA, 23 bp, Artificial Sequence
  Description of Artificial Sequence: Synthetic oligonucleotide
aatcagagaagcaaagtaagagg

SEQ ID NO: 2688 - DNA, 23 bp, Artificial Sequence
  Description of Artificial Sequence: Synthetic oligonucleotide
atcagagaagcaaagtaagaggg

SEQ ID NO: 2689 - DNA, 23 bp, Artificial Sequence
  Description of Artificial Sequence: Synthetic oligonucleotide
agtaagagggaagagcagagagg

SEQ ID NO: 2690 - DNA, 23 bp, Artificial Sequence
  Description of Artificial Sequence: Synthetic oligonucleotide
ggaagagcagagaggacagcagg

SEQ ID NO: 2691 - DNA, 23 bp, Artificial Sequence
  Description of Artificial Sequence: Synthetic oligonucleotide
gaagagcagagaggacagcaggg

SEQ ID NO: 2692 - DNA, 23 bp, Artificial Sequence
  Description of Artificial Sequence: Synthetic oligonucleotide
cagagaggacagcagggacaagg

SEQ ID NO: 2693 - DNA, 23 bp, Artificial Sequence
  Description of Artificial Sequence: Synthetic oligonucleotide
ggacagcagggacaaggacttgg

SEQ ID NO: 2694 - DNA, 23 bp, Artificial Sequence
  Description of Artificial Sequence: Synthetic oligonucleotide
gacagcagggacaaggacttggg

SEQ ID NO: 2695 - DNA, 23 bp, Artificial Sequence
  Description of Artificial Sequence: Synthetic oligonucleotide
acagcagggacaaggacttgggg

SEQ ID NO: 2696 - DNA, 23 bp, Artificial Sequence
  Description of Artificial Sequence: Synthetic oligonucleotide
cagcagggacaaggacttggggg

SEQ ID NO: 2697 - DNA, 23 bp, Artificial Sequence
  Description of Artificial Sequence: Synthetic oligonucleotide
agggacaaggacttgggggcagg

SEQ ID NO: 2698 - DNA, 23 bp, Artificial Sequence
  Description of Artificial Sequence: Synthetic oligonucleotide
aaggacttgggggcaggaagagg

SEQ ID NO: 2699 - DNA, 23 bp, Artificial Sequence
  Description of Artificial Sequence: Synthetic oligonucleotide
cttgggggcaggaagaggaaagg

SEQ ID NO: 2700 - DNA, 23 bp, Artificial Sequence
  Description of Artificial Sequence: Synthetic oligonucleotide
ggggcaggaagaggaaaggcagg

SEQ ID NO: 2701 - DNA, 23 bp, Artificial Sequence
  Description of Artificial Sequence: Synthetic oligonucleotide
ggaagaggaaaggcaggttaagg

SEQ ID NO: 2702 - DNA, 23 bp, Artificial Sequence
  Description of Artificial Sequence: Synthetic oligonucleotide
caggttaaggacatgaaagatgg

SEQ ID NO: 2703 - DNA, 23 bp, Artificial Sequence
  Description of Artificial Sequence: Synthetic oligonucleotide
taaggacatgaaagatggccagg

SEQ ID NO: 2704 - DNA, 23 bp, Artificial Sequence
  Description of Artificial Sequence: Synthetic oligonucleotide
gacatgaaagatggccaggctgg

SEQ ID NO: 2705 - DNA, 23 bp, Artificial Sequence
  Description of Artificial Sequence: Synthetic oligonucleotide
ggcctgagctccagccagcctgg

SEQ ID NO: 2706 - DNA, 23 bp, Artificial Sequence
  Description of Artificial Sequence: Synthetic oligonucleotide
tgaaagatggccaggctggctgg

SEQ ID NO: 2707 - DNA, 23 bp, Artificial Sequence
  Description of Artificial Sequence: Synthetic oligonucleotide
ggccaggctggctggagctcagg

SEQ ID NO: 2708 - DNA, 23 bp, Artificial Sequence
  Description of Artificial Sequence: Synthetic oligonucleotide
gctggagctcaggcccagcaagg

SEQ ID NO: 2709 - DNA, 23 bp, Artificial Sequence
  Description of Artificial Sequence: Synthetic oligonucleotide
ggcccccagggggccttgctggg

SEQ ID NO: 2710 - DNA, 23 bp, Artificial Sequence
  Description of Artificial Sequence: Synthetic oligonucleotide
tggcccccagggggccttgctgg

SEQ ID NO: 2711 - DNA, 23 bp, Artificial Sequence
  Description of Artificial Sequence: Synthetic oligonucleotide
tcaggcccagcaaggccccctgg

SEQ ID NO: 2712 - DNA, 23 bp, Artificial Sequence
  Description of Artificial Sequence: Synthetic oligonucleotide
caggcccagcaaggccccctggg

SEQ ID NO: 2713 - DNA, 23 bp, Artificial Sequence
  Description of Artificial Sequence: Synthetic oligonucleotide
aggcccagcaaggccccctgggg

SEQ ID NO: 2714 - DNA, 23 bp, Artificial Sequence
  Description of Artificial Sequence: Synthetic oligonucleotide
ggcccagcaaggccccctggggg

SEQ ID NO: 2715 - DNA, 23 bp, Artificial Sequence
  Description of Artificial Sequence: Synthetic oligonucleotide
ccatgaccatggcccccaggggg

SEQ ID NO: 2716 - DNA, 23 bp, Artificial Sequence
  Description of Artificial Sequence: Synthetic oligonucleotide
cccatgaccatggcccccagggg

SEQ ID NO: 2717 - DNA, 23 bp, Artificial Sequence
  Description of Artificial Sequence: Synthetic oligonucleotide
acccatgaccatggcccccaggg

SEQ ID NO: 2718 - DNA, 23 bp, Artificial Sequence
  Description of Artificial Sequence: Synthetic oligonucleotide
cacccatgaccatggcccccagg

SEQ ID NO: 2719 - DNA, 23 bp, Artificial Sequence
  Description of Artificial Sequence: Synthetic oligonucleotide
gcaaggccccctgggggccatgg

SEQ ID NO: 2720 - DNA, 23 bp, Artificial Sequence
  Description of Artificial Sequence: Synthetic oligonucleotide
ccccctgggggccatggtcatgg

SEQ ID NO: 2721 - DNA, 23 bp, Artificial Sequence
  Description of Artificial Sequence: Synthetic oligonucleotide
cccaagctcacccatgaccatgg

SEQ ID NO: 2722 - DNA, 23 bp, Artificial Sequence
  Description of Artificial Sequence: Synthetic oligonucleotide
cccctgggggccatggtcatggg

SEQ ID NO: 2723 - DNA, 23 bp, Artificial Sequence
  Description of Artificial Sequence: Synthetic oligonucleotide
gccatggtcatgggtgagcttgg

SEQ ID NO: 2724 - DNA, 23 bp, Artificial Sequence
  Description of Artificial Sequence: Synthetic oligonucleotide
ccatggtcatgggtgagcttggg

SEQ ID NO: 2725 - DNA, 23 bp, Artificial Sequence
  Description of Artificial Sequence: Synthetic oligonucleotide
gtcatgggtgagcttgggtttgg

SEQ ID NO: 2726 - DNA, 23 bp, Artificial Sequence
  Description of Artificial Sequence: Synthetic oligonucleotide
tttggcttctgttttcgtcttgg

SEQ ID NO: 2727 - DNA, 23 bp, Artificial Sequence
  Description of Artificial Sequence: Synthetic oligonucleotide
ttggcttctgttttcgtcttggg

SEQ ID NO: 2728 - DNA, 23 bp, Artificial Sequence
  Description of Artificial Sequence: Synthetic oligonucleotide
tggttccccgcaagggctcgagg

SEQ ID NO: 2729 - DNA, 23 bp, Artificial Sequence
  Description of Artificial Sequence: Synthetic oligonucleotide
gtgaaagcctcgagcccttgcgg

SEQ ID NO: 2730 - DNA, 23 bp, Artificial Sequence
  Description of Artificial Sequence: Synthetic oligonucleotide
tgaaagcctcgagcccttgcggg

SEQ ID NO: 2731 - DNA, 23 bp, Artificial Sequence
  Description of Artificial Sequence: Synthetic oligonucleotide
gaaagcctcgagcccttgcgggg

SEQ ID NO: 2732 - DNA, 23 bp, Artificial Sequence
  Description of Artificial Sequence: Synthetic oligonucleotide
gcttcactggttccccgcaaggg

SEQ ID NO: 2733 - DNA, 23 bp, Artificial Sequence
  Description of Artificial Sequence: Synthetic oligonucleotide
agcttcactggttccccgcaagg

SEQ ID NO: 2734 - DNA, 23 bp, Artificial Sequence
  Description of Artificial Sequence: Synthetic oligonucleotide
agatgcacacacagcttcactgg

SEQ ID NO: 2735 - DNA, 23 bp, Artificial Sequence
  Description of Artificial Sequence: Synthetic oligonucleotide
agctgtgtgtgcatcttctgtgg

SEQ ID NO: 2736 - DNA, 23 bp, Artificial Sequence
  Description of Artificial Sequence: Synthetic oligonucleotide
gctgtgtgtgcatcttctgtggg

SEQ ID NO: 2737 - DNA, 23 bp, Artificial Sequence
  Description of Artificial Sequence: Synthetic oligonucleotide
ctgtgtgtgcatcttctgtgggg

SEQ ID NO: 2738 - DNA, 23 bp, Artificial Sequence
  Description of Artificial Sequence: Synthetic oligonucleotide
ggagtgctccctgaagactctgg

SEQ ID NO: 2739 - DNA, 23 bp, Artificial Sequence
  Description of Artificial Sequence: Synthetic oligonucleotide
tggggagtgccagagtcttcagg

SEQ ID NO: 2740 - DNA, 23 bp, Artificial Sequence
  Description of Artificial Sequence: Synthetic oligonucleotide
ggggagtgccagagtcttcaggg

SEQ ID NO: 2741 - DNA, 23 bp, Artificial Sequence
  Description of Artificial Sequence: Synthetic oligonucleotide
gaggcagcagcaggagccaaagg

SEQ ID NO: 2742 - DNA, 23 bp, Artificial Sequence
  Description of Artificial Sequence: Synthetic oligonucleotide
tgcacaaatgaggcagcagcagg

SEQ ID NO: 2743 - DNA, 23 bp, Artificial Sequence
  Description of Artificial Sequence: Synthetic oligonucleotide
tcaatctagctgcacaaatgagg

SEQ ID NO: 2744 - DNA, 23 bp, Artificial Sequence
  Description of Artificial Sequence: Synthetic oligonucleotide
cttggaccagagcaggtcttggg

SEQ ID NO: 2745 - DNA, 23 bp, Artificial Sequence
  Description of Artificial Sequence: Synthetic oligonucleotide
tcttggaccagagcaggtcttgg

SEQ ID NO: 2746 - DNA, 23 bp, Artificial Sequence
  Description of Artificial Sequence: Synthetic oligonucleotide
attgagcccaagacctgctctgg

SEQ ID NO: 2747 - DNA, 23 bp, Artificial Sequence
  Description of Artificial Sequence: Synthetic oligonucleotide
tgttcatcttggaccagagcagg

SEQ ID NO: 2748 - DNA, 23 bp, Artificial Sequence
  Description of Artificial Sequence: Synthetic oligonucleotide
ggcaggtggtatgttcatcttgg

SEQ ID NO: 2749 - DNA, 23 bp, Artificial Sequence
  Description of Artificial Sequence: Synthetic oligonucleotide
gagggtcacctcatggcaggtgg

SEQ ID NO: 2750 - DNA, 23 bp, Artificial Sequence
  Description of Artificial Sequence: Synthetic oligonucleotide
tgaacataccacctgccatgagg

SEQ ID NO: 2751 - DNA, 23 bp, Artificial Sequence
  Description of Artificial Sequence: Synthetic oligonucleotide
cctgagggtcacctcatggcagg

SEQ ID NO: 2752 - DNA, 23 bp, Artificial Sequence
  Description of Artificial Sequence: Synthetic oligonucleotide
atatcctgagggtcacctcatgg

SEQ ID NO: 2753 - DNA, 23 bp, Artificial Sequence
  Description of Artificial Sequence: Synthetic oligonucleotide
cctgccatgaggtgaccctcagg

SEQ ID NO: 2754 - DNA, 23 bp, Artificial Sequence
  Description of Artificial Sequence: Synthetic oligonucleotide
ggctgcagtggatatcctgaggg

SEQ ID NO: 2755 - DNA, 23 bp, Artificial Sequence
  Description of Artificial Sequence: Synthetic oligonucleotide
tggctgcagtggatatcctgagg

SEQ ID NO: 2756 - DNA, 23 bp, Artificial Sequence
  Description of Artificial Sequence: Synthetic oligonucleotide
accccagcccatggctgcagtgg

SEQ ID NO: 2757 - DNA, 23 bp, Artificial Sequence
  Description of Artificial Sequence: Synthetic oligonucleotide
caggatatccactgcagccatgg

SEQ ID NO: 2758 - DNA, 23 bp, Artificial Sequence
  Description of Artificial Sequence: Synthetic oligonucleotide
aggatatccactgcagccatggg

SEQ ID NO: 2759 - DNA, 23 bp, Artificial Sequence
  Description of Artificial Sequence: Synthetic oligonucleotide
tatccactgcagccatgggctgg

SEQ ID NO: 2760 - DNA, 23 bp, Artificial Sequence
  Description of Artificial Sequence: Synthetic oligonucleotide
atccactgcagccatgggctggg

SEQ ID NO: 2761 - DNA, 23 bp, Artificial Sequence
  Description of Artificial Sequence: Synthetic oligonucleotide
gacaggatgaccccagcccatgg

SEQ ID NO: 2762 - DNA, 23 bp, Artificial Sequence
  Description of Artificial Sequence: Synthetic oligonucleotide
tccactgcagccatgggctgggg

SEQ ID NO: 2763 - DNA, 23 bp, Artificial Sequence
  Description of Artificial Sequence: Synthetic oligonucleotide
gttagctgaagcaacaggacagg

SEQ ID NO: 2764 - DNA, 23 bp, Artificial Sequence
  Description of Artificial Sequence: Synthetic oligonucleotide
acacggttagctgaagcaacagg

SEQ ID NO: 2765 - DNA, 23 bp, Artificial Sequence
  Description of Artificial Sequence: Synthetic oligonucleotide
tagtgtggctgctagagacacgg

SEQ ID NO: 2766 - DNA, 23 bp, Artificial Sequence
  Description of Artificial Sequence: Synthetic oligonucleotide
agtcagccctcagagtagtgtgg

SEQ ID NO: 2767 - DNA, 23 bp, Artificial Sequence
  Description of Artificial Sequence: Synthetic oligonucleotide
ctagcagccacactactctgagg

SEQ ID NO: 2768 - DNA, 23 bp, Artificial Sequence
  Description of Artificial Sequence: Synthetic oligonucleotide
tagcagccacactactctgaggg

SEQ ID NO: 2769 - DNA, 23 bp, Artificial Sequence
  Description of Artificial Sequence: Synthetic oligonucleotide
ctctcccagacaaaagctgctgg

SEQ ID NO: 2770 - DNA, 23 bp, Artificial Sequence
  Description of Artificial Sequence: Synthetic oligonucleotide
agaatccagcagcttttgtctgg

SEQ ID NO: 2771 - DNA, 23 bp, Artificial Sequence
  Description of Artificial Sequence: Synthetic oligonucleotide
gaatccagcagcttttgtctggg

SEQ ID NO: 2772 - DNA, 23 bp, Artificial Sequence
  Description of Artificial Sequence: Synthetic oligonucleotide
cagcttttgtctgggagagctgg

SEQ ID NO: 2773 - DNA, 23 bp, Artificial Sequence
  Description of Artificial Sequence: Synthetic oligonucleotide
gggagagctggactgaagagagg

SEQ ID NO: 2774 - DNA, 23 bp, Artificial Sequence
  Description of Artificial Sequence: Synthetic oligonucleotide
ggactgaagagaggcatagctgg

SEQ ID NO: 2775 - DNA, 23 bp, Artificial Sequence
  Description of Artificial Sequence: Synthetic oligonucleotide
catagctggagacccatagctgg

SEQ ID NO: 2776 - DNA, 23 bp, Artificial Sequence
  Description of Artificial Sequence: Synthetic oligonucleotide
ttctggccagggccagctatggg

SEQ ID NO: 2777 - DNA, 23 bp, Artificial Sequence
  Description of Artificial Sequence: Synthetic oligonucleotide
tttctggccagggccagctatgg

SEQ ID NO: 2778 - DNA, 23 bp, Artificial Sequence
  Description of Artificial Sequence: Synthetic oligonucleotide
tggagacccatagctggccctgg

SEQ ID NO: 2779 - DNA, 23 bp, Artificial Sequence
  Description of Artificial Sequence: Synthetic oligonucleotide
actctccctgtttctggccaggg

SEQ ID NO: 2780 - DNA, 23 bp, Artificial Sequence
  Description of Artificial Sequence: Synthetic oligonucleotide
cactctccctgtttctggccagg

SEQ ID NO: 2781 - DNA, 23 bp, Artificial Sequence
  Description of Artificial Sequence: Synthetic oligonucleotide
agctggccctggccagaaacagg

SEQ ID NO: 2782 - DNA, 23 bp, Artificial Sequence
  Description of Artificial Sequence: Synthetic oligonucleotide
gctggccctggccagaaacaggg

SEQ ID NO: 2783 - DNA, 23 bp, Artificial Sequence
  Description of Artificial Sequence: Synthetic oligonucleotide
cctttcactctccctgtttctgg

SEQ ID NO: 2784 - DNA, 23 bp, Artificial Sequence
  Description of Artificial Sequence: Synthetic oligonucleotide
ccagaaacagggagagtgaaagg

SEQ ID NO: 2785 - DNA, 23 bp, Artificial Sequence
  Description of Artificial Sequence: Synthetic oligonucleotide
aaacagggagagtgaaaggctgg

SEQ ID NO: 2786 - DNA, 23 bp, Artificial Sequence
  Description of Artificial Sequence: Synthetic oligonucleotide
gtgaaaggctggaatagccaagg

SEQ ID NO: 2787 - DNA, 23 bp, Artificial Sequence
  Description of Artificial Sequence: Synthetic oligonucleotide
tattagccttgctctggccttgg

SEQ ID NO: 2788 - DNA, 23 bp, Artificial Sequence
  Description of Artificial Sequence: Synthetic oligonucleotide
gaatagccaaggccagagcaagg

SEQ ID NO: 2789 - DNA, 23 bp, Artificial Sequence
  Description of Artificial Sequence: Synthetic oligonucleotide
tctacctattagccttgctctgg

SEQ ID NO: 2790 - DNA, 23 bp, Artificial Sequence
  Description of Artificial Sequence: Synthetic oligonucleotide
aaggccagagcaaggctaatagg

SEQ ID NO: 2791 - DNA, 23 bp, Artificial Sequence
  Description of Artificial Sequence: Synthetic oligonucleotide
taggtagagcaacagcttacagg

SEQ ID NO: 2792 - DNA, 23 bp, Artificial Sequence
  Description of Artificial Sequence: Synthetic oligonucleotide
agagcaacagcttacaggtgtgg

SEQ ID NO: 2793 - DNA, 23 bp, Artificial Sequence
  Description of Artificial Sequence: Synthetic oligonucleotide
gagcaacagcttacaggtgtggg

SEQ ID NO: 2794 - DNA, 23 bp, Artificial Sequence
  Description of Artificial Sequence: Synthetic oligonucleotide
agcaacagcttacaggtgtgggg

SEQ ID NO: 2795 - DNA, 23 bp, Artificial Sequence
  Description of Artificial Sequence: Synthetic oligonucleotide
gcaacagcttacaggtgtggggg

SEQ ID NO: 2796 - DNA, 23 bp, Artificial Sequence
  Description of Artificial Sequence: Synthetic oligonucleotide
acagcttacaggtgtgggggtgg

SEQ ID NO: 2797 - DNA, 23 bp, Artificial Sequence
  Description of Artificial Sequence: Synthetic oligonucleotide
ggtgtgggggtggcagatactgg

SEQ ID NO: 2798 - DNA, 23 bp, Artificial Sequence
  Description of Artificial Sequence: Synthetic oligonucleotide
agatactggcacccttgaaatgg

SEQ ID NO: 2799 - DNA, 23 bp, Artificial Sequence
  Description of Artificial Sequence: Synthetic oligonucleotide
gcatgaggaatccatttcaaggg

SEQ ID NO: 2800 - DNA, 23 bp, Artificial Sequence
  Description of Artificial Sequence: Synthetic oligonucleotide
ggcatgaggaatccatttcaagg

SEQ ID NO: 2801 - DNA, 23 bp, Artificial Sequence
  Description of Artificial Sequence: Synthetic oligonucleotide
aatagtgaagcgtgggcatgagg

SEQ ID NO: 2802 - DNA, 23 bp, Artificial Sequence
  Description of Artificial Sequence: Synthetic oligonucleotide
agagaagaatagtgaagcgtggg

SEQ ID NO: 2803 - DNA, 23 bp, Artificial Sequence
  Description of Artificial Sequence: Synthetic oligonucleotide
cagagaagaatagtgaagcgtgg

SEQ ID NO: 2804 - DNA, 23 bp, Artificial Sequence
  Description of Artificial Sequence: Synthetic oligonucleotide
cgcttcactattcttctctgtgg

SEQ ID NO: 2805 - DNA, 23 bp, Artificial Sequence
  Description of Artificial Sequence: Synthetic oligonucleotide
cactattcttctctgtggctagg

SEQ ID NO: 2806 - DNA, 23 bp, Artificial Sequence
  Description of Artificial Sequence: Synthetic oligonucleotide
actattcttctctgtggctaggg

SEQ ID NO: 2807 - DNA, 23 bp, Artificial Sequence
  Description of Artificial Sequence: Synthetic oligonucleotide
ctattcttctctgtggctagggg

SEQ ID NO: 2808 - DNA, 23 bp, Artificial Sequence
  Description of Artificial Sequence: Synthetic oligonucleotide
ctctgtggctaggggatttatgg

SEQ ID NO: 2809 - DNA, 23 bp, Artificial Sequence
  Description of Artificial Sequence: Synthetic oligonucleotide
ctggtttttaactgtaattttgg

SEQ ID NO: 2810 - DNA, 23 bp, Artificial Sequence
  Description of Artificial Sequence: Synthetic oligonucleotide
tacagttaaaaaccagccatagg

SEQ ID NO: 2811 - DNA, 23 bp, Artificial Sequence
  Description of Artificial Sequence: Synthetic oligonucleotide
cactgtgcctggcctatggctgg

SEQ ID NO: 2812 - DNA, 23 bp, Artificial Sequence
  Description of Artificial Sequence: Synthetic oligonucleotide
ttaaaaaccagccataggccagg

SEQ ID NO: 2813 - DNA, 23 bp, Artificial Sequence
  Description of Artificial Sequence: Synthetic oligonucleotide
gagtcactgtgcctggcctatgg

SEQ ID NO: 2814 - DNA, 23 bp, Artificial Sequence
  Description of Artificial Sequence: Synthetic oligonucleotide
aaggcgtgagtcactgtgcctgg

SEQ ID NO: 2815 - DNA, 23 bp, Artificial Sequence
  Description of Artificial Sequence: Synthetic oligonucleotide
tcccaaagtgctgatattaaagg

SEQ ID NO: 2816 - DNA, 23 bp, Artificial Sequence
  Description of Artificial Sequence: Synthetic oligonucleotide
cgcctttaatatcagcactttgg

SEQ ID NO: 2817 - DNA, 23 bp, Artificial Sequence
  Description of Artificial Sequence: Synthetic oligonucleotide
gcctttaatatcagcactttggg

SEQ ID NO: 2818 - DNA, 23 bp, Artificial Sequence
  Description of Artificial Sequence: Synthetic oligonucleotide
tttaatatcagcactttgggagg

SEQ ID NO: 2819 - DNA, 23 bp, Artificial Sequence
  Description of Artificial Sequence: Synthetic oligonucleotide
atcagcactttgggaggacaagg

SEQ ID NO: 2820 - DNA, 23 bp, Artificial Sequence
  Description of Artificial Sequence: Synthetic oligonucleotide
agcactttgggaggacaaggtgg

SEQ ID NO: 2821 - DNA, 23 bp, Artificial Sequence
  Description of Artificial Sequence: Synthetic oligonucleotide
gcactttgggaggacaaggtggg

SEQ ID NO: 2822 - DNA, 23 bp, Artificial Sequence
  Description of Artificial Sequence: Synthetic oligonucleotide
ctttgggaggacaaggtgggcgg

SEQ ID NO: 2823 - DNA, 23 bp, Artificial Sequence
  Description of Artificial Sequence: Synthetic oligonucleotide
tgggcggatcacctgagatctgg

SEQ ID NO: 2824 - DNA, 23 bp, Artificial Sequence
  Description of Artificial Sequence: Synthetic oligonucleotide
ggtctcaaattccagatctcagg

SEQ ID NO: 2825 - DNA, 23 bp, Artificial Sequence
  Description of Artificial Sequence: Synthetic oligonucleotide
tctggaatttgagaccagcctgg

SEQ ID NO: 2826 - DNA, 23 bp, Artificial Sequence
  Description of Artificial Sequence: Synthetic oligonucleotide
tttcgccatgttggccaggctgg

SEQ ID NO: 2827 - DNA, 23 bp, Artificial Sequence
  Description of Artificial Sequence: Synthetic oligonucleotide
ggggtttcgccatgttggccagg

SEQ ID NO: 2828 - DNA, 23 bp, Artificial Sequence
  Description of Artificial Sequence: Synthetic oligonucleotide
tgagaccagcctggccaacatgg

SEQ ID NO: 2829 - DNA, 23 bp, Artificial Sequence
  Description of Artificial Sequence: Synthetic oligonucleotide
gagatggggtttcgccatgttgg

SEQ ID NO: 2830 - DNA, 23 bp, Artificial Sequence
  Description of Artificial Sequence: Synthetic oligonucleotide
ttgtatttttagtagagatgggg

SEQ ID NO: 2831 - DNA, 23 bp, Artificial Sequence
  Description of Artificial Sequence: Synthetic oligonucleotide
tttgtatttttagtagagatggg

SEQ ID NO: 2832 - DNA, 23 bp, Artificial Sequence
  Description of Artificial Sequence: Synthetic oligonucleotide
ttttgtatttttagtagagatgg

SEQ ID NO: 2833 - DNA, 23 bp, Artificial Sequence
  Description of Artificial Sequence: Synthetic oligonucleotide
ctaaaaatacaaaaattagctgg

SEQ ID NO: 2834 - DNA, 23 bp, Artificial Sequence
  Description of Artificial Sequence: Synthetic oligonucleotide
taaaaatacaaaaattagctggg

SEQ ID NO: 2835 - DNA, 23 bp, Artificial Sequence
  Description of Artificial Sequence: Synthetic oligonucleotide
atacaaaaattagctgggcatgg

SEQ ID NO: 2836 - DNA, 23 bp, Artificial Sequence
  Description of Artificial Sequence: Synthetic oligonucleotide
caaaaattagctgggcatggtgg

SEQ ID NO: 2837 - DNA, 23 bp, Artificial Sequence
  Description of Artificial Sequence: Synthetic oligonucleotide
aaattagctgggcatggtggtgg

SEQ ID NO: 2838 - DNA, 23 bp, Artificial Sequence
  Description of Artificial Sequence: Synthetic oligonucleotide
aattagctgggcatggtggtggg

SEQ ID NO: 2839 - DNA, 23 bp, Artificial Sequence
  Description of Artificial Sequence: Synthetic oligonucleotide
ccctgagtaactgggattacagg

SEQ ID NO: 2840 - DNA, 23 bp, Artificial Sequence
  Description of Artificial Sequence: Synthetic oligonucleotide
gcctcagcccctgagtaactggg

SEQ ID NO: 2841 - DNA, 23 bp, Artificial Sequence
  Description of Artificial Sequence: Synthetic oligonucleotide
tgcctcagcccctgagtaactgg

SEQ ID NO: 2842 - DNA, 23 bp, Artificial Sequence
  Description of Artificial Sequence: Synthetic oligonucleotide
acctgtaatcccagttactcagg

SEQ ID NO: 2843 - DNA, 23 bp, Artificial Sequence
  Description of Artificial Sequence: Synthetic oligonucleotide
cctgtaatcccagttactcaggg

SEQ ID NO: 2844 - DNA, 23 bp, Artificial Sequence
  Description of Artificial Sequence: Synthetic oligonucleotide
ctgtaatcccagttactcagggg

SEQ ID NO: 2845 - DNA, 23 bp, Artificial Sequence
  Description of Artificial Sequence: Synthetic oligonucleotide
tcccagttactcaggggctgagg

SEQ ID NO: 2846 - DNA, 23 bp, Artificial Sequence
  Description of Artificial Sequence: Synthetic oligonucleotide
agttactcaggggctgaggcagg

SEQ ID NO: 2847 - DNA, 23 bp, Artificial Sequence
  Description of Artificial Sequence: Synthetic oligonucleotide
ctccacctcctgggttcaagtgg

SEQ ID NO: 2848 - DNA, 23 bp, Artificial Sequence
  Description of Artificial Sequence: Synthetic oligonucleotide
caggagaaccacttgaacccagg

SEQ ID NO: 2849 - DNA, 23 bp, Artificial Sequence
  Description of Artificial Sequence: Synthetic oligonucleotide
gagaaccacttgaacccaggagg

SEQ ID NO: 2850 - DNA, 23 bp, Artificial Sequence
  Description of Artificial Sequence: Synthetic oligonucleotide
aaccacttgaacccaggaggtgg

SEQ ID NO: 2851 - DNA, 23 bp, Artificial Sequence
  Description of Artificial Sequence: Synthetic oligonucleotide
cactgcaacctccacctcctggg

SEQ ID NO: 2852 - DNA, 23 bp, Artificial Sequence
  Description of Artificial Sequence: Synthetic oligonucleotide
tcactgcaacctccacctcctgg

SEQ ID NO: 2853 - DNA, 23 bp, Artificial Sequence
  Description of Artificial Sequence: Synthetic oligonucleotide
cacttgaacccaggaggtggagg

SEQ ID NO: 2854 - DNA, 23 bp, Artificial Sequence
  Description of Artificial Sequence: Synthetic oligonucleotide
ggagtgcagtggtgcaagcttgg

SEQ ID NO: 2855 - DNA, 23 bp, Artificial Sequence
  Description of Artificial Sequence: Synthetic oligonucleotide
tcacccaggctggagtgcagtgg

SEQ ID NO: 2856 - DNA, 23 bp, Artificial Sequence
  Description of Artificial Sequence: Synthetic oligonucleotide
tgcaccactgcactccagcctgg

SEQ ID NO: 2857 - DNA, 23 bp, Artificial Sequence
  Description of Artificial Sequence: Synthetic oligonucleotide
gcaccactgcactccagcctggg

SEQ ID NO: 2858 - DNA, 23 bp, Artificial Sequence
  Description of Artificial Sequence: Synthetic oligonucleotide
tgtcgctgtgtcacccaggctgg

SEQ ID NO: 2859 - DNA, 23 bp, Artificial Sequence
  Description of Artificial Sequence: Synthetic oligonucleotide
ggagtgtcgctgtgtcacccagg

SEQ ID NO: 2860 - DNA, 23 bp, Artificial Sequence
  Description of Artificial Sequence: Synthetic oligonucleotide
tttttttttttttcttgagacgg

SEQ ID NO: 2861 - DNA, 23 bp, Artificial Sequence
  Description of Artificial Sequence: Synthetic oligonucleotide
gggcatgacgaaatctgaaatgg

SEQ ID NO: 2862 - DNA, 23 bp, Artificial Sequence
  Description of Artificial Sequence: Synthetic oligonucleotide
acttagcagctcattgaggaggg

SEQ ID NO: 2863 - DNA, 23 bp, Artificial Sequence
  Description of Artificial Sequence: Synthetic oligonucleotide
aacttagcagctcattgaggagg

SEQ ID NO: 2864 - DNA, 23 bp, Artificial Sequence
  Description of Artificial Sequence: Synthetic oligonucleotide
cctaacttagcagctcattgagg

SEQ ID NO: 2865 - DNA, 23 bp, Artificial Sequence
  Description of Artificial Sequence: Synthetic oligonucleotide
cctcaatgagctgctaagttagg

SEQ ID NO: 2866 - DNA, 23 bp, Artificial Sequence
  Description of Artificial Sequence: Synthetic oligonucleotide
agtgcattgattattgctgcagg

SEQ ID NO: 2867 - DNA, 23 bp, Artificial Sequence
  Description of Artificial Sequence: Synthetic oligonucleotide
attgattattgctgcaggagagg

SEQ ID NO: 2868 - DNA, 23 bp, Artificial Sequence
  Description of Artificial Sequence: Synthetic oligonucleotide
ttgattattgctgcaggagaggg

SEQ ID NO: 2869 - DNA, 23 bp, Artificial Sequence
  Description of Artificial Sequence: Synthetic oligonucleotide
ttattgctgcaggagagggaagg

SEQ ID NO: 2870 - DNA, 23 bp, Artificial Sequence
  Description of Artificial Sequence: Synthetic oligonucleotide
tgctgcaggagagggaaggaagg

SEQ ID NO: 2871 - DNA, 23 bp, Artificial Sequence
  Description of Artificial Sequence: Synthetic oligonucleotide
gttttcacatgttttccttttgg

SEQ ID NO: 2872 - DNA, 23 bp, Artificial Sequence
  Description of Artificial Sequence: Synthetic oligonucleotide
cctcctttctcatctccaaaagg

SEQ ID NO: 2873 - DNA, 23 bp, Artificial Sequence
  Description of Artificial Sequence: Synthetic oligonucleotide
tttccttttggagatgagaaagg

SEQ ID NO: 2874 - DNA, 23 bp, Artificial Sequence
  Description of Artificial Sequence: Synthetic oligonucleotide
ccttttggagatgagaaaggagg

SEQ ID NO: 2875 - DNA, 23 bp, Artificial Sequence
  Description of Artificial Sequence: Synthetic oligonucleotide
aaaggggcagggtagggggaagg

SEQ ID NO: 2876 - DNA, 23 bp, Artificial Sequence
  Description of Artificial Sequence: Synthetic oligonucleotide
gtagaaaggggcagggtaggggg

SEQ ID NO: 2877 - DNA, 23 bp, Artificial Sequence
  Description of Artificial Sequence: Synthetic oligonucleotide
agtagaaaggggcagggtagggg

SEQ ID NO: 2878 - DNA, 23 bp, Artificial Sequence
  Description of Artificial Sequence: Synthetic oligonucleotide
gagtagaaaggggcagggtaggg

SEQ ID NO: 2879 - DNA, 23 bp, Artificial Sequence
  Description of Artificial Sequence: Synthetic oligonucleotide
ggagtagaaaggggcagggtagg

SEQ ID NO: 2880 - DNA, 23 bp, Artificial Sequence
  Description of Artificial Sequence: Synthetic oligonucleotide
tcctggagtagaaaggggcaggg

SEQ ID NO: 2881 - DNA, 23 bp, Artificial Sequence
  Description of Artificial Sequence: Synthetic oligonucleotide
gtcctggagtagaaaggggcagg

SEQ ID NO: 2882 - DNA, 23 bp, Artificial Sequence
  Description of Artificial Sequence: Synthetic oligonucleotide
agaggtcctggagtagaaagggg

SEQ ID NO: 2883 - DNA, 23 bp, Artificial Sequence
  Description of Artificial Sequence: Synthetic oligonucleotide
cagaggtcctggagtagaaaggg

SEQ ID NO: 2884 - DNA, 23 bp, Artificial Sequence
  Description of Artificial Sequence: Synthetic oligonucleotide
tcagaggtcctggagtagaaagg

SEQ ID NO: 2885 - DNA, 23 bp, Artificial Sequence
  Description of Artificial Sequence: Synthetic oligonucleotide
accctgcccctttctactccagg

SEQ ID NO: 2886 - DNA, 23 bp, Artificial Sequence
  Description of Artificial Sequence: Synthetic oligonucleotide
tcatggcctttcagaggtcctgg

SEQ ID NO: 2887 - DNA, 23 bp, Artificial Sequence
  Description of Artificial Sequence: Synthetic oligonucleotide
tctactccaggacctctgaaagg

SEQ ID NO: 2888 - DNA, 23 bp, Artificial Sequence
  Description of Artificial Sequence: Synthetic oligonucleotide
ttgtgctcatggcctttcagagg

SEQ ID NO: 2889 - DNA, 23 bp, Artificial Sequence
  Description of Artificial Sequence: Synthetic oligonucleotide
aggcagcagctttgtgctcatgg

SEQ ID NO: 2890 - DNA, 23 bp, Artificial Sequence
  Description of Artificial Sequence: Synthetic oligonucleotide
ccctgcatttcaggggactcagg

SEQ ID NO: 2891 - DNA, 23 bp, Artificial Sequence
  Description of Artificial Sequence: Synthetic oligonucleotide
gggcgtaccctgcatttcagggg

SEQ ID NO: 2892 - DNA, 23 bp, Artificial Sequence
  Description of Artificial Sequence: Synthetic oligonucleotide
ggggcgtaccctgcatttcaggg

SEQ ID NO: 2893 - DNA, 23 bp, Artificial Sequence
  Description of Artificial Sequence: Synthetic oligonucleotide
tggggcgtaccctgcatttcagg

SEQ ID NO: 2894 - DNA, 23 bp, Artificial Sequence
  Description of Artificial Sequence: Synthetic oligonucleotide
gcctgagtcccctgaaatgcagg

SEQ ID NO: 2895 - DNA, 23 bp, Artificial Sequence
  Description of Artificial Sequence: Synthetic oligonucleotide
cctgagtcccctgaaatgcaggg

SEQ ID NO: 2896 - DNA, 23 bp, Artificial Sequence
  Description of Artificial Sequence: Synthetic oligonucleotide
tgaaatgcagggtacgccccagg

SEQ ID NO: 2897 - DNA, 23 bp, Artificial Sequence
  Description of Artificial Sequence: Synthetic oligonucleotide
tggggtacatcagagacctgggg

SEQ ID NO: 2898 - DNA, 23 bp, Artificial Sequence
  Description of Artificial Sequence: Synthetic oligonucleotide
gtggggtacatcagagacctggg

SEQ ID NO: 2899 - DNA, 23 bp, Artificial Sequence
  Description of Artificial Sequence: Synthetic oligonucleotide
ggtggggtacatcagagacctgg

SEQ ID NO: 2900 - DNA, 23 bp, Artificial Sequence
  Description of Artificial Sequence: Synthetic oligonucleotide
ttgagaggaaaagtgtggtgggg

SEQ ID NO: 2901 - DNA, 23 bp, Artificial Sequence
  Description of Artificial Sequence: Synthetic oligonucleotide
tttgagaggaaaagtgtggtggg

SEQ ID NO: 2902 - DNA, 23 bp, Artificial Sequence
  Description of Artificial Sequence: Synthetic oligonucleotide
gtttgagaggaaaagtgtggtgg

SEQ ID NO: 2903 - DNA, 23 bp, Artificial Sequence
  Description of Artificial Sequence: Synthetic oligonucleotide
tatgtttgagaggaaaagtgtgg

SEQ ID NO: 2904 - DNA, 23 bp, Artificial Sequence
  Description of Artificial Sequence: Synthetic oligonucleotide
gatcctggaatatgtttgagagg

SEQ ID NO: 2905 - DNA, 23 bp, Artificial Sequence
  Description of Artificial Sequence: Synthetic oligonucleotide
tttcctctcaaacatattccagg

SEQ ID NO: 2906 - DNA, 23 bp, Artificial Sequence
  Description of Artificial Sequence: Synthetic oligonucleotide
caaaagaaatcaagtgatcctgg

SEQ ID NO: 2907 - DNA, 23 bp, Artificial Sequence
  Description of Artificial Sequence: Synthetic oligonucleotide
atatagcacattgacacggtggg

SEQ ID NO: 2908 - DNA, 23 bp, Artificial Sequence
  Description of Artificial Sequence: Synthetic oligonucleotide
tatatagcacattgacacggtgg

SEQ ID NO: 2909 - DNA, 23 bp, Artificial Sequence
  Description of Artificial Sequence: Synthetic oligonucleotide
ttttatatagcacattgacacgg

SEQ ID NO: 2910 - DNA, 23 bp, Artificial Sequence
  Description of Artificial Sequence: Synthetic oligonucleotide
tttaaatgtatagatgtataggg

SEQ ID NO: 2911 - DNA, 23 bp, Artificial Sequence
  Description of Artificial Sequence: Synthetic oligonucleotide
ctttaaatgtatagatgtatagg

SEQ ID NO: 2912 - DNA, 23 bp, Artificial Sequence
  Description of Artificial Sequence: Synthetic oligonucleotide
cccatccctgcacagatagaagg

SEQ ID NO: 2913 - DNA, 23 bp, Artificial Sequence
  Description of Artificial Sequence: Synthetic oligonucleotide
tgttctccttctatctgtgcagg

SEQ ID NO: 2914 - DNA, 23 bp, Artificial Sequence
  Description of Artificial Sequence: Synthetic oligonucleotide
gttctccttctatctgtgcaggg

SEQ ID NO: 2915 - DNA, 23 bp, Artificial Sequence
  Description of Artificial Sequence: Synthetic oligonucleotide
tccttctatctgtgcagggatgg

SEQ ID NO: 2916 - DNA, 23 bp, Artificial Sequence
  Description of Artificial Sequence: Synthetic oligonucleotide
ccttctatctgtgcagggatggg

SEQ ID NO: 2917 - DNA, 23 bp, Artificial Sequence
  Description of Artificial Sequence: Synthetic oligonucleotide
tatctgtgcagggatgggaaagg

SEQ ID NO: 2918 - DNA, 23 bp, Artificial Sequence
  Description of Artificial Sequence: Synthetic oligonucleotide
atctgtgcagggatgggaaaggg

SEQ ID NO: 2919 - DNA, 23 bp, Artificial Sequence
  Description of Artificial Sequence: Synthetic oligonucleotide
catatttctgaaagcacagatgg

SEQ ID NO: 2920 - DNA, 23 bp, Artificial Sequence
  Description of Artificial Sequence: Synthetic oligonucleotide
atatttctgaaagcacagatggg

SEQ ID NO: 2921 - DNA, 23 bp, Artificial Sequence
  Description of Artificial Sequence: Synthetic oligonucleotide
tgaaagcacagatgggaagacgg

SEQ ID NO: 2922 - DNA, 23 bp, Artificial Sequence
  Description of Artificial Sequence: Synthetic oligonucleotide
gaaagcacagatgggaagacggg

SEQ ID NO: 2923 - DNA, 23 bp, Artificial Sequence
  Description of Artificial Sequence: Synthetic oligonucleotide
acgggatttgttccgtgtccagg

SEQ ID NO: 2924 - DNA, 23 bp, Artificial Sequence
  Description of Artificial Sequence: Synthetic oligonucleotide
gtaccataatcacctggacacgg

SEQ ID NO: 2925 - DNA, 23 bp, Artificial Sequence
  Description of Artificial Sequence: Synthetic oligonucleotide
atagaggtaccataatcacctgg

SEQ ID NO: 2926 - DNA, 23 bp, Artificial Sequence
  Description of Artificial Sequence: Synthetic oligonucleotide
gttccgtgtccaggtgattatgg

SEQ ID NO: 2927 - DNA, 23 bp, Artificial Sequence
  Description of Artificial Sequence: Synthetic oligonucleotide
agtgccggccaggcgcatagagg

SEQ ID NO: 2928 - DNA, 23 bp, Artificial Sequence
  Description of Artificial Sequence: Synthetic oligonucleotide
ttatggtacctctatgcgcctgg

SEQ ID NO: 2929 - DNA, 23 bp, Artificial Sequence
  Description of Artificial Sequence: Synthetic oligonucleotide
ggtacctctatgcgcctggccgg

SEQ ID NO: 2930 - DNA, 23 bp, Artificial Sequence
  Description of Artificial Sequence: Synthetic oligonucleotide
ctctgtccccagtgccggccagg

SEQ ID NO: 2931 - DNA, 23 bp, Artificial Sequence
  Description of Artificial Sequence: Synthetic oligonucleotide
tctatgcgcctggccggcactgg

SEQ ID NO: 2932 - DNA, 23 bp, Artificial Sequence
  Description of Artificial Sequence: Synthetic oligonucleotide
ctatgcgcctggccggcactggg

SEQ ID NO: 2933 - DNA, 23 bp, Artificial Sequence
  Description of Artificial Sequence: Synthetic oligonucleotide
tatgcgcctggccggcactgggg

SEQ ID NO: 2934 - DNA, 23 bp, Artificial Sequence
  Description of Artificial Sequence: Synthetic oligonucleotide
atggcctctgtccccagtgccgg

SEQ ID NO: 2935 - DNA, 23 bp, Artificial Sequence
  Description of Artificial Sequence: Synthetic oligonucleotide
ctggccggcactggggacagagg

SEQ ID NO: 2936 - DNA, 23 bp, Artificial Sequence
  Description of Artificial Sequence: Synthetic oligonucleotide
ctgtgctgtattcattttcatgg

SEQ ID NO: 2937 - DNA, 23 bp, Artificial Sequence
  Description of Artificial Sequence: Synthetic oligonucleotide
cttaagtttcttggaggcaaagg

SEQ ID NO: 2938 - DNA, 23 bp, Artificial Sequence
  Description of Artificial Sequence: Synthetic oligonucleotide
ctaggtcttaagtttcttggagg

SEQ ID NO: 2939 - DNA, 23 bp, Artificial Sequence
  Description of Artificial Sequence: Synthetic oligonucleotide
ctactaggtcttaagtttcttgg

SEQ ID NO: 2940 - DNA, 23 bp, Artificial Sequence
  Description of Artificial Sequence: Synthetic oligonucleotide
taaagcctgccatttctactagg

SEQ ID NO: 2941 - DNA, 23 bp, Artificial Sequence
  Description of Artificial Sequence: Synthetic oligonucleotide
aacttaagacctagtagaaatgg

SEQ ID NO: 2942 - DNA, 23 bp, Artificial Sequence
  Description of Artificial Sequence: Synthetic oligonucleotide
taagacctagtagaaatggcagg

SEQ ID NO: 2943 - DNA, 23 bp, Artificial Sequence
  Description of Artificial Sequence: Synthetic oligonucleotide
gaaatggcaggctttaaaacagg

SEQ ID NO: 2944 - DNA, 23 bp, Artificial Sequence
  Description of Artificial Sequence: Synthetic oligonucleotide
caggctttaaaacaggttgttgg

SEQ ID NO: 2945 - DNA, 23 bp, Artificial Sequence
  Description of Artificial Sequence: Synthetic oligonucleotide
aggctttaaaacaggttgttggg

SEQ ID NO: 2946 - DNA, 23 bp, Artificial Sequence
  Description of Artificial Sequence: Synthetic oligonucleotide
caggttgttgggatctgatttgg

SEQ ID NO: 2947 - DNA, 23 bp, Artificial Sequence
  Description of Artificial Sequence: Synthetic oligonucleotide
gagatactcacagcacaaaatgg

SEQ ID NO: 2948 - DNA, 23 bp, Artificial Sequence
  Description of Artificial Sequence: Synthetic oligonucleotide
agatactcacagcacaaaatggg

SEQ ID NO: 2949 - DNA, 23 bp, Artificial Sequence
  Description of Artificial Sequence: Synthetic oligonucleotide
gatactcacagcacaaaatgggg

SEQ ID NO: 2950 - DNA, 23 bp, Artificial Sequence
  Description of Artificial Sequence: Synthetic oligonucleotide
acagcacaaaatggggaatgagg

SEQ ID NO: 2951 - DNA, 23 bp, Artificial Sequence
  Description of Artificial Sequence: Synthetic oligonucleotide
cagcacaaaatggggaatgaggg

SEQ ID NO: 2952 - DNA, 23 bp, Artificial Sequence
  Description of Artificial Sequence: Synthetic oligonucleotide
cacaaaatggggaatgagggcgg

SEQ ID NO: 2953 - DNA, 23 bp, Artificial Sequence
  Description of Artificial Sequence: Synthetic oligonucleotide
acaaaatggggaatgagggcggg

SEQ ID NO: 2954 - DNA, 23 bp, Artificial Sequence
  Description of Artificial Sequence: Synthetic oligonucleotide
tggggaatgagggcgggcattgg

SEQ ID NO: 2955 - DNA, 23 bp, Artificial Sequence
  Description of Artificial Sequence: Synthetic oligonucleotide
ggggaatgagggcgggcattggg

SEQ ID NO: 2956 - DNA, 23 bp, Artificial Sequence
  Description of Artificial Sequence: Synthetic oligonucleotide
ttgggacacacatagccttaagg

SEQ ID NO: 2957 - DNA, 23 bp, Artificial Sequence
  Description of Artificial Sequence: Synthetic oligonucleotide
tgggacacacatagccttaaggg

SEQ ID NO: 2958 - DNA, 23 bp, Artificial Sequence
  Description of Artificial Sequence: Synthetic oligonucleotide
gggacacacatagccttaagggg

SEQ ID NO: 2959 - DNA, 23 bp, Artificial Sequence
  Description of Artificial Sequence: Synthetic oligonucleotide
aaaagcctttgggccccttaagg

SEQ ID NO: 2960 - DNA, 23 bp, Artificial Sequence
  Description of Artificial Sequence: Synthetic oligonucleotide
catagccttaaggggcccaaagg

SEQ ID NO: 2961 - DNA, 23 bp, Artificial Sequence
  Description of Artificial Sequence: Synthetic oligonucleotide
atacagttctaaaagcctttggg

SEQ ID NO: 2962 - DNA, 23 bp, Artificial Sequence
  Description of Artificial Sequence: Synthetic oligonucleotide
aatacagttctaaaagcctttgg

SEQ ID NO: 2963 - DNA, 23 bp, Artificial Sequence
  Description of Artificial Sequence: Synthetic oligonucleotide
gtgcaaatcatgttttaataggg

SEQ ID NO: 2964 - DNA, 23 bp, Artificial Sequence
  Description of Artificial Sequence: Synthetic oligonucleotide
tgtgcaaatcatgttttaatagg

SEQ ID NO: 2965 - DNA, 23 bp, Artificial Sequence
  Description of Artificial Sequence: Synthetic oligonucleotide
acagagcacattctttgctttgg

SEQ ID NO: 2966 - DNA, 23 bp, Artificial Sequence
  Description of Artificial Sequence: Synthetic oligonucleotide
gcctatagtaaggagttctgagg

SEQ ID NO: 2967 - DNA, 23 bp, Artificial Sequence
  Description of Artificial Sequence: Synthetic oligonucleotide
acctcagaactccttactatagg

SEQ ID NO: 2968 - DNA, 23 bp, Artificial Sequence
  Description of Artificial Sequence: Synthetic oligonucleotide
accatgcccggcctatagtaagg

SEQ ID NO: 2969 - DNA, 23 bp, Artificial Sequence
  Description of Artificial Sequence: Synthetic oligonucleotide
cagaactccttactataggccgg

SEQ ID NO: 2970 - DNA, 23 bp, Artificial Sequence
  Description of Artificial Sequence: Synthetic oligonucleotide
agaactccttactataggccggg

SEQ ID NO: 2971 - DNA, 23 bp, Artificial Sequence
  Description of Artificial Sequence: Synthetic oligonucleotide
tccttactataggccgggcatgg

SEQ ID NO: 2972 - DNA, 23 bp, Artificial Sequence
  Description of Artificial Sequence: Synthetic oligonucleotide
gctgggattataaccatgcccgg

SEQ ID NO: 2973 - DNA, 23 bp, Artificial Sequence
  Description of Artificial Sequence: Synthetic oligonucleotide
ccttggcttcccaaagtgctggg

SEQ ID NO: 2974 - DNA, 23 bp, Artificial Sequence
  Description of Artificial Sequence: Synthetic oligonucleotide
tggttataatcccagcactttgg

SEQ ID NO: 2975 - DNA, 23 bp, Artificial Sequence
  Description of Artificial Sequence: Synthetic oligonucleotide
gccttggcttcccaaagtgctgg

SEQ ID NO: 2976 - DNA, 23 bp, Artificial Sequence
  Description of Artificial Sequence: Synthetic oligonucleotide
ggttataatcccagcactttggg

SEQ ID NO: 2977 - DNA, 23 bp, Artificial Sequence
  Description of Artificial Sequence: Synthetic oligonucleotide
cccagcactttgggaagccaagg

SEQ ID NO: 2978 - DNA, 23 bp, Artificial Sequence
  Description of Artificial Sequence: Synthetic oligonucleotide
agcactttgggaagccaaggcgg

SEQ ID NO: 2979 - DNA, 23 bp, Artificial Sequence
  Description of Artificial Sequence: Synthetic oligonucleotide
gcactttgggaagccaaggcggg

SEQ ID NO: 2980 - DNA, 23 bp, Artificial Sequence
  Description of Artificial Sequence: Synthetic oligonucleotide
ctcaagtgatctgcccgccttgg

SEQ ID NO: 2981 - DNA, 23 bp, Artificial Sequence
  Description of Artificial Sequence: Synthetic oligonucleotide
caaggcgggcagatcacttgagg

SEQ ID NO: 2982 - DNA, 23 bp, Artificial Sequence
  Description of Artificial Sequence: Synthetic oligonucleotide
ctgagagttcaagaccagcctgg

SEQ ID NO: 2983 - DNA, 23 bp, Artificial Sequence
  Description of Artificial Sequence: Synthetic oligonucleotide
ttttaccatgttggccaggctgg

SEQ ID NO: 2984 - DNA, 23 bp, Artificial Sequence
  Description of Artificial Sequence: Synthetic oligonucleotide
ggggttttaccatgttggccagg

SEQ ID NO: 2985 - DNA, 23 bp, Artificial Sequence
  Description of Artificial Sequence: Synthetic oligonucleotide
caagaccagcctggccaacatgg

SEQ ID NO: 2986 - DNA, 23 bp, Artificial Sequence
  Description of Artificial Sequence: Synthetic oligonucleotide
gagacggggttttaccatgttgg

SEQ ID NO: 2987 - DNA, 23 bp, Artificial Sequence
  Description of Artificial Sequence: Synthetic oligonucleotide
ttgtatttttagtagagacgggg

SEQ ID NO: 2988 - DNA, 23 bp, Artificial Sequence
  Description of Artificial Sequence: Synthetic oligonucleotide
tttgtatttttagtagagacggg

SEQ ID NO: 2989 - DNA, 23 bp, Artificial Sequence
  Description of Artificial Sequence: Synthetic oligonucleotide
ttttgtatttttagtagagacgg

SEQ ID NO: 2990 - DNA, 23 bp, Artificial Sequence
  Description of Artificial Sequence: Synthetic oligonucleotide
ctaaaaatacaaaaattagctgg

SEQ ID NO: 2991 - DNA, 23 bp, Artificial Sequence
  Description of Artificial Sequence: Synthetic oligonucleotide
taaaaatacaaaaattagctggg

SEQ ID NO: 2992 - DNA, 23 bp, Artificial Sequence
  Description of Artificial Sequence: Synthetic oligonucleotide
atacaaaaattagctgggtgtgg

SEQ ID NO: 2993 - DNA, 23 bp, Artificial Sequence
  Description of Artificial Sequence: Synthetic oligonucleotide
caaaaattagctgggtgtggtgg

SEQ ID NO: 2994 - DNA, 23 bp, Artificial Sequence
  Description of Artificial Sequence: Synthetic oligonucleotide
aaattagctgggtgtggtggtgg

SEQ ID NO: 2995 - DNA, 23 bp, Artificial Sequence
  Description of Artificial Sequence: Synthetic oligonucleotide
tgagtagctgggattacaggtgg

SEQ ID NO: 2996 - DNA, 23 bp, Artificial Sequence
  Description of Artificial Sequence: Synthetic oligonucleotide
tcctgagtagctgggattacagg

SEQ ID NO: 2997 - DNA, 23 bp, Artificial Sequence
  Description of Artificial Sequence: Synthetic oligonucleotide
cctcagcctcctgagtagctggg

SEQ ID NO: 2998 - DNA, 23 bp, Artificial Sequence
  Description of Artificial Sequence: Synthetic oligonucleotide
acctcagcctcctgagtagctgg

SEQ ID NO: 2999 - DNA, 23 bp, Artificial Sequence
  Description of Artificial Sequence: Synthetic oligonucleotide
acctgtaatcccagctactcagg

SEQ ID NO: 3000 - DNA, 23 bp, Artificial Sequence
  Description of Artificial Sequence: Synthetic oligonucleotide
tgtaatcccagctactcaggagg

SEQ ID NO: 3001 - DNA, 23 bp, Artificial Sequence
  Description of Artificial Sequence: Synthetic oligonucleotide
cccagctactcaggaggctgagg

SEQ ID NO: 3002 - DNA, 23 bp, Artificial Sequence
  Description of Artificial Sequence: Synthetic oligonucleotide
gctactcaggaggctgaggtagg

SEQ ID NO: 3003 - DNA, 23 bp, Artificial Sequence
  Description of Artificial Sequence: Synthetic oligonucleotide
gtaggagaatcacttgaacctgg

SEQ ID NO: 3004 - DNA, 23 bp, Artificial Sequence
  Description of Artificial Sequence: Synthetic oligonucleotide
taggagaatcacttgaacctggg

SEQ ID NO: 3005 - DNA, 23 bp, Artificial Sequence
  Description of Artificial Sequence: Synthetic oligonucleotide
gagaatcacttgaacctgggagg

SEQ ID NO: 3006 - DNA, 23 bp, Artificial Sequence
  Description of Artificial Sequence: Synthetic oligonucleotide
tattgcaacttctgcctcccagg

SEQ ID NO: 3007 - DNA, 23 bp, Artificial Sequence
  Description of Artificial Sequence: Synthetic oligonucleotide
ggagtgcagtggcatgatctggg

SEQ ID NO: 3008 - DNA, 23 bp, Artificial Sequence
  Description of Artificial Sequence: Synthetic oligonucleotide
tggagtgcagtggcatgatctgg

SEQ ID NO: 3009 - DNA, 23 bp, Artificial Sequence
  Description of Artificial Sequence: Synthetic oligonucleotide
ttgcccaggctggagtgcagtgg

SEQ ID NO: 3010 - DNA, 23 bp, Artificial Sequence
  Description of Artificial Sequence: Synthetic oligonucleotide
catgccactgcactccagcctgg

SEQ ID NO: 3011 - DNA, 23 bp, Artificial Sequence
  Description of Artificial Sequence: Synthetic oligonucleotide
atgccactgcactccagcctggg

SEQ ID NO: 3012 - DNA, 23 bp, Artificial Sequence
  Description of Artificial Sequence: Synthetic oligonucleotide
tctagctttgttgcccaggctgg

SEQ ID NO: 3013 - DNA, 23 bp, Artificial Sequence
  Description of Artificial Sequence: Synthetic oligonucleotide
agagtctagctttgttgcccagg

SEQ ID NO: 3014 - DNA, 23 bp, Artificial Sequence
  Description of Artificial Sequence: Synthetic oligonucleotide
ttttcttacagtttataataagg

SEQ ID NO: 3015 - DNA, 23 bp, Artificial Sequence
  Description of Artificial Sequence: Synthetic oligonucleotide
tataaactgtaagaaaaaaaagg

SEQ ID NO: 3016 - DNA, 23 bp, Artificial Sequence
  Description of Artificial Sequence: Synthetic oligonucleotide
ttgcaaaagggacgaagtagggg

SEQ ID NO: 3017 - DNA, 23 bp, Artificial Sequence
  Description of Artificial Sequence: Synthetic oligonucleotide
tttgcaaaagggacgaagtaggg

SEQ ID NO: 3018 - DNA, 23 bp, Artificial Sequence
  Description of Artificial Sequence: Synthetic oligonucleotide
atttgcaaaagggacgaagtagg

SEQ ID NO: 3019 - DNA, 23 bp, Artificial Sequence
  Description of Artificial Sequence: Synthetic oligonucleotide
gaaaaggcagatttgcaaaaggg

SEQ ID NO: 3020 - DNA, 23 bp, Artificial Sequence
  Description of Artificial Sequence: Synthetic oligonucleotide
ggaaaaggcagatttgcaaaagg

SEQ ID NO: 3021 - DNA, 23 bp, Artificial Sequence
  Description of Artificial Sequence: Synthetic oligonucleotide
gctggttagtgagtaggaaaagg

SEQ ID NO: 3022 - DNA, 23 bp, Artificial Sequence
  Description of Artificial Sequence: Synthetic oligonucleotide
gaaccagctggttagtgagtagg

SEQ ID NO: 3023 - DNA, 23 bp, Artificial Sequence
  Description of Artificial Sequence: Synthetic oligonucleotide
tttcctactcactaaccagctgg

SEQ ID NO: 3024 - DNA, 23 bp, Artificial Sequence
  Description of Artificial Sequence: Synthetic oligonucleotide
tgtccttgctctgaaccagctgg

SEQ ID NO: 3025 - DNA, 23 bp, Artificial Sequence
  Description of Artificial Sequence: Synthetic oligonucleotide
taaccagctggttcagagcaagg

SEQ ID NO: 3026 - DNA, 23 bp, Artificial Sequence
  Description of Artificial Sequence: Synthetic oligonucleotide
cagagcaaggacactctgtttgg

SEQ ID NO: 3027 - DNA, 23 bp, Artificial Sequence
  Description of Artificial Sequence: Synthetic oligonucleotide
ttccttccagtctgcagcgatgg

SEQ ID NO: 3028 - DNA, 23 bp, Artificial Sequence
  Description of Artificial Sequence: Synthetic oligonucleotide
ttggtgccatcgctgcagactgg

SEQ ID NO: 3029 - DNA, 23 bp, Artificial Sequence
  Description of Artificial Sequence: Synthetic oligonucleotide
tgccatcgctgcagactggaagg

SEQ ID NO: 3030 - DNA, 23 bp, Artificial Sequence
  Description of Artificial Sequence: Synthetic oligonucleotide
cgctgcagactggaaggaagagg

SEQ ID NO: 3031 - DNA, 23 bp, Artificial Sequence
  Description of Artificial Sequence: Synthetic oligonucleotide
agactgttgggtgtggggcaagg

SEQ ID NO: 3032 - DNA, 23 bp, Artificial Sequence
  Description of Artificial Sequence: Synthetic oligonucleotide
gcaggagactgttgggtgtgggg

SEQ ID NO: 3033 - DNA, 23 bp, Artificial Sequence
  Description of Artificial Sequence: Synthetic oligonucleotide
agcaggagactgttgggtgtggg

SEQ ID NO: 3034 - DNA, 23 bp, Artificial Sequence
  Description of Artificial Sequence: Synthetic oligonucleotide
cagcaggagactgttgggtgtgg

SEQ ID NO: 3035 - DNA, 23 bp, Artificial Sequence
  Description of Artificial Sequence: Synthetic oligonucleotide
ggtaacagcaggagactgttggg

SEQ ID NO: 3036 - DNA, 23 bp, Artificial Sequence
  Description of Artificial Sequence: Synthetic oligonucleotide
cggtaacagcaggagactgttgg

SEQ ID NO: 3037 - DNA, 23 bp, Artificial Sequence
  Description of Artificial Sequence: Synthetic oligonucleotide
gccaacctgccggtaacagcagg

SEQ ID NO: 3038 - DNA, 23 bp, Artificial Sequence
  Description of Artificial Sequence: Synthetic oligonucleotide
caacagtctcctgctgttaccgg

SEQ ID NO: 3039 - DNA, 23 bp, Artificial Sequence
  Description of Artificial Sequence: Synthetic oligonucleotide
agtctcctgctgttaccggcagg

SEQ ID NO: 3040 - DNA, 23 bp, Artificial Sequence
  Description of Artificial Sequence: Synthetic oligonucleotide
tcctgctgttaccggcaggttgg

SEQ ID NO: 3041 - DNA, 23 bp, Artificial Sequence
  Description of Artificial Sequence: Synthetic oligonucleotide
ctgcctgcctgccaacctgccgg

SEQ ID NO: 3042 - DNA, 23 bp, Artificial Sequence
  Description of Artificial Sequence: Synthetic oligonucleotide
gctgttaccggcaggttggcagg

SEQ ID NO: 3043 - DNA, 23 bp, Artificial Sequence
  Description of Artificial Sequence: Synthetic oligonucleotide
ttaccggcaggttggcaggcagg

SEQ ID NO: 3044 - DNA, 23 bp, Artificial Sequence
  Description of Artificial Sequence: Synthetic oligonucleotide
cggcaggttggcaggcaggcagg

SEQ ID NO: 3045 - DNA, 23 bp, Artificial Sequence
  Description of Artificial Sequence: Synthetic oligonucleotide
caggcaggcgagaagcagccagg

SEQ ID NO: 3046 - DNA, 23 bp, Artificial Sequence
  Description of Artificial Sequence: Synthetic oligonucleotide
aggcaggcgagaagcagccaggg

SEQ ID NO: 3047 - DNA, 23 bp, Artificial Sequence
  Description of Artificial Sequence: Synthetic oligonucleotide
aggcgagaagcagccagggctgg

SEQ ID NO: 3048 - DNA, 23 bp, Artificial Sequence
  Description of Artificial Sequence: Synthetic oligonucleotide
actggacacaccaccagccctgg

SEQ ID NO: 3049 - DNA, 23 bp, Artificial Sequence
  Description of Artificial Sequence: Synthetic oligonucleotide
cgagaagcagccagggctggtgg

SEQ ID NO: 3050 - DNA, 23 bp, Artificial Sequence
  Description of Artificial Sequence: Synthetic oligonucleotide
ctggaaactagtcttcaaactgg

SEQ ID NO: 3051 - DNA, 23 bp, Artificial Sequence
  Description of Artificial Sequence: Synthetic oligonucleotide
tgaagactagtttccagccctgg

SEQ ID NO: 3052 - DNA, 23 bp, Artificial Sequence
  Description of Artificial Sequence: Synthetic oligonucleotide
agggtgagcagggccagggctgg

SEQ ID NO: 3053 - DNA, 23 bp, Artificial Sequence
  Description of Artificial Sequence: Synthetic oligonucleotide
ttggagggtgagcagggccaggg

SEQ ID NO: 3054 - DNA, 23 bp, Artificial Sequence
  Description of Artificial Sequence: Synthetic oligonucleotide
cttggagggtgagcagggccagg

SEQ ID NO: 3055 - DNA, 23 bp, Artificial Sequence
  Description of Artificial Sequence: Synthetic oligonucleotide
ggccacttggagggtgagcaggg

SEQ ID NO: 3056 - DNA, 23 bp, Artificial Sequence
  Description of Artificial Sequence: Synthetic oligonucleotide
gggccacttggagggtgagcagg

SEQ ID NO: 3057 - DNA, 23 bp, Artificial Sequence
  Description of Artificial Sequence: Synthetic oligonucleotide
ggccctgctcaccctccaagtgg

SEQ ID NO: 3058 - DNA, 23 bp, Artificial Sequence
  Description of Artificial Sequence: Synthetic oligonucleotide
acctgccagggccacttggaggg

SEQ ID NO: 3059 - DNA, 23 bp, Artificial Sequence
  Description of Artificial Sequence: Synthetic oligonucleotide
aacctgccagggccacttggagg

SEQ ID NO: 3060 - DNA, 23 bp, Artificial Sequence
  Description of Artificial Sequence: Synthetic oligonucleotide
aggaacctgccagggccacttgg

SEQ ID NO: 3061 - DNA, 23 bp, Artificial Sequence
  Description of Artificial Sequence: Synthetic oligonucleotide
gctcaccctccaagtggccctgg

SEQ ID NO: 3062 - DNA, 23 bp, Artificial Sequence
  Description of Artificial Sequence: Synthetic oligonucleotide
accctccaagtggccctggcagg

SEQ ID NO: 3063 - DNA, 23 bp, Artificial Sequence
  Description of Artificial Sequence: Synthetic oligonucleotide
tgtggtagaggaacctgccaggg

SEQ ID NO: 3064 - DNA, 23 bp, Artificial Sequence
  Description of Artificial Sequence: Synthetic oligonucleotide
atgtggtagaggaacctgccagg

SEQ ID NO: 3065 - DNA, 23 bp, Artificial Sequence
  Description of Artificial Sequence: Synthetic oligonucleotide
tgaagtccacgatgtggtagagg

SEQ ID NO: 3066 - DNA, 23 bp, Artificial Sequence
  Description of Artificial Sequence: Synthetic oligonucleotide
caggttcctctaccacatcgtgg

SEQ ID NO: 3067 - DNA, 23 bp, Artificial Sequence
  Description of Artificial Sequence: Synthetic oligonucleotide
ggaaggtgaagtccacgatgtgg

SEQ ID NO: 3068 - DNA, 23 bp, Artificial Sequence
  Description of Artificial Sequence: Synthetic oligonucleotide
ttgagcttcttagagaaggaagg

SEQ ID NO: 3069 - DNA, 23 bp, Artificial Sequence
  Description of Artificial Sequence: Synthetic oligonucleotide
gggattgagcttcttagagaagg

SEQ ID NO: 3070 - DNA, 23 bp, Artificial Sequence
  Description of Artificial Sequence: Synthetic oligonucleotide
tctaagaagctcaatccccaagg

SEQ ID NO: 3071 - DNA, 23 bp, Artificial Sequence
  Description of Artificial Sequence: Synthetic oligonucleotide
cctatgggaatgaggccttgggg

SEQ ID NO: 3072 - DNA, 23 bp, Artificial Sequence
  Description of Artificial Sequence: Synthetic oligonucleotide
gcctatgggaatgaggccttggg

SEQ ID NO: 3073 - DNA, 23 bp, Artificial Sequence
  Description of Artificial Sequence: Synthetic oligonucleotide
ggcctatgggaatgaggccttgg

SEQ ID NO: 3074 - DNA, 23 bp, Artificial Sequence
  Description of Artificial Sequence: Synthetic oligonucleotide
tgagaaggcctatgggaatgagg

SEQ ID NO: 3075 - DNA, 23 bp, Artificial Sequence
  Description of Artificial Sequence: Synthetic oligonucleotide
ccccaaggcctcattcccatagg

SEQ ID NO: 3076 - DNA, 23 bp, Artificial Sequence
  Description of Artificial Sequence: Synthetic oligonucleotide
aaaagggtgagaaggcctatggg

SEQ ID NO: 3077 - DNA, 23 bp, Artificial Sequence
  Description of Artificial Sequence: Synthetic oligonucleotide
aaaaagggtgagaaggcctatgg

SEQ ID NO: 3078 - DNA, 23 bp, Artificial Sequence
  Description of Artificial Sequence: Synthetic oligonucleotide
gggaaagaaaaagggtgagaagg

SEQ ID NO: 3079 - DNA, 23 bp, Artificial Sequence
  Description of Artificial Sequence: Synthetic oligonucleotide
cagccagagggaaagaaaaaggg

SEQ ID NO: 3080 - DNA, 23 bp, Artificial Sequence
  Description of Artificial Sequence: Synthetic oligonucleotide
tcagccagagggaaagaaaaagg

SEQ ID NO: 3081 - DNA, 23 bp, Artificial Sequence
  Description of Artificial Sequence: Synthetic oligonucleotide
tcaccctttttctttccctctgg

SEQ ID NO: 3082 - DNA, 23 bp, Artificial Sequence
  Description of Artificial Sequence: Synthetic oligonucleotide
gctggccacattcagccagaggg

SEQ ID NO: 3083 - DNA, 23 bp, Artificial Sequence
  Description of Artificial Sequence: Synthetic oligonucleotide
tgctggccacattcagccagagg

SEQ ID NO: 3084 - DNA, 23 bp, Artificial Sequence
  Description of Artificial Sequence: Synthetic oligonucleotide
tctttccctctggctgaatgtgg

SEQ ID NO: 3085 - DNA, 23 bp, Artificial Sequence
  Description of Artificial Sequence: Synthetic oligonucleotide
ctggctgaatgtggccagcacgg

SEQ ID NO: 3086 - DNA, 23 bp, Artificial Sequence
  Description of Artificial Sequence: Synthetic oligonucleotide
tggctgaatgtggccagcacggg

SEQ ID NO: 3087 - DNA, 23 bp, Artificial Sequence
  Description of Artificial Sequence: Synthetic oligonucleotide
atggccttggaagcccgtgctgg

SEQ ID NO: 3088 - DNA, 23 bp, Artificial Sequence
  Description of Artificial Sequence: Synthetic oligonucleotide
gtggccagcacgggcttccaagg

SEQ ID NO: 3089 - DNA, 23 bp, Artificial Sequence
  Description of Artificial Sequence: Synthetic oligonucleotide
tgcagacgagttgatggccttgg

SEQ ID NO: 3090 - DNA, 23 bp, Artificial Sequence
  Description of Artificial Sequence: Synthetic oligonucleotide
ggctgctgcagacgagttgatgg

SEQ ID NO: 3091 - DNA, 23 bp, Artificial Sequence
  Description of Artificial Sequence: Synthetic oligonucleotide
ctgaggccctgcaaggcatgggg

SEQ ID NO: 3092 - DNA, 23 bp, Artificial Sequence
  Description of Artificial Sequence: Synthetic oligonucleotide
tctgaggccctgcaaggcatggg

SEQ ID NO: 3093 - DNA, 23 bp, Artificial Sequence
  Description of Artificial Sequence: Synthetic oligonucleotide
ctctgaggccctgcaaggcatgg

SEQ ID NO: 3094 - DNA, 23 bp, Artificial Sequence
  Description of Artificial Sequence: Synthetic oligonucleotide
gcagcagccccatgccttgcagg

SEQ ID NO: 3095 - DNA, 23 bp, Artificial Sequence
  Description of Artificial Sequence: Synthetic oligonucleotide
cagcagccccatgccttgcaggg

SEQ ID NO: 3096 - DNA, 23 bp, Artificial Sequence
  Description of Artificial Sequence: Synthetic oligonucleotide
ggaagctctgaggccctgcaagg

SEQ ID NO: 3097 - DNA, 23 bp, Artificial Sequence
  Description of Artificial Sequence: Synthetic oligonucleotide
ataggcaggaggaagctctgagg

SEQ ID NO: 3098 - DNA, 23 bp, Artificial Sequence
  Description of Artificial Sequence: Synthetic oligonucleotide
accacactgtcataggcaggagg

SEQ ID NO: 3099 - DNA, 23 bp, Artificial Sequence
  Description of Artificial Sequence: Synthetic oligonucleotide
aaaaccacactgtcataggcagg

SEQ ID NO: 3100 - DNA, 23 bp, Artificial Sequence
  Description of Artificial Sequence: Synthetic oligonucleotide
aaccaaaaccacactgtcatagg

SEQ ID NO: 3101 - DNA, 23 bp, Artificial Sequence
  Description of Artificial Sequence: Synthetic oligonucleotide
tcctcctgcctatgacagtgtgg

SEQ ID NO: 3102 - DNA, 23 bp, Artificial Sequence
  Description of Artificial Sequence: Synthetic oligonucleotide
tgcctatgacagtgtggttttgg

SEQ ID NO: 3103 - DNA, 23 bp, Artificial Sequence
  Description of Artificial Sequence: Synthetic oligonucleotide
gtggttttggttcccacacttgg

SEQ ID NO: 3104 - DNA, 23 bp, Artificial Sequence
  Description of Artificial Sequence: Synthetic oligonucleotide
tggttttggttcccacacttggg

SEQ ID NO: 3105 - DNA, 23 bp, Artificial Sequence
  Description of Artificial Sequence: Synthetic oligonucleotide
ttcaatctgatcccaagtgtggg

SEQ ID NO: 3106 - DNA, 23 bp, Artificial Sequence
  Description of Artificial Sequence: Synthetic oligonucleotide
tttcaatctgatcccaagtgtgg

SEQ ID NO: 3107 - DNA, 23 bp, Artificial Sequence
  Description of Artificial Sequence: Synthetic oligonucleotide
cagattgaaactcgcctccgtgg

SEQ ID NO: 3108 - DNA, 23 bp, Artificial Sequence
  Description of Artificial Sequence: Synthetic oligonucleotide
gtcccatattctcaccacggagg

SEQ ID NO: 3109 - DNA, 23 bp, Artificial Sequence
  Description of Artificial Sequence: Synthetic oligonucleotide
tatgtcccatattctcaccacgg

SEQ ID NO: 3110 - DNA, 23 bp, Artificial Sequence
  Description of Artificial Sequence: Synthetic oligonucleotide
tcgcctccgtggtgagaatatgg

SEQ ID NO: 3111 - DNA, 23 bp, Artificial Sequence
  Description of Artificial Sequence: Synthetic oligonucleotide
cgcctccgtggtgagaatatggg

SEQ ID NO: 3112 - DNA, 23 bp, Artificial Sequence
  Description of Artificial Sequence: Synthetic oligonucleotide
gaatatgggacatagagcctcgg

SEQ ID NO: 3113 - DNA, 23 bp, Artificial Sequence
  Description of Artificial Sequence: Synthetic oligonucleotide
gctgctcaccaaggtcaccgagg

SEQ ID NO: 3114 - DNA, 23 bp, Artificial Sequence
  Description of Artificial Sequence: Synthetic oligonucleotide
acatagagcctcggtgaccttgg

SEQ ID NO: 3115 - DNA, 23 bp, Artificial Sequence
  Description of Artificial Sequence: Synthetic oligonucleotide
gcctggactgctgctcaccaagg

SEQ ID NO: 3116 - DNA, 23 bp, Artificial Sequence
  Description of Artificial Sequence: Synthetic oligonucleotide
accttggtgagcagcagtccagg

SEQ ID NO: 3117 - DNA, 23 bp, Artificial Sequence
  Description of Artificial Sequence: Synthetic oligonucleotide
cccaggctgagcaggtggcctgg

SEQ ID NO: 3118 - DNA, 23 bp, Artificial Sequence
  Description of Artificial Sequence: Synthetic oligonucleotide
ccaaccccaggctgagcaggtgg

SEQ ID NO: 3119 - DNA, 23 bp, Artificial Sequence
  Description of Artificial Sequence: Synthetic oligonucleotide
cccccaaccccaggctgagcagg

SEQ ID NO: 3120 - DNA, 23 bp, Artificial Sequence
  Description of Artificial Sequence: Synthetic oligonucleotide
tccaggccacctgctcagcctgg

SEQ ID NO: 3121 - DNA, 23 bp, Artificial Sequence
  Description of Artificial Sequence: Synthetic oligonucleotide
ccaggccacctgctcagcctggg

SEQ ID NO: 3122 - DNA, 23 bp, Artificial Sequence
  Description of Artificial Sequence: Synthetic oligonucleotide
caggccacctgctcagcctgggg

SEQ ID NO: 3123 - DNA, 23 bp, Artificial Sequence
  Description of Artificial Sequence: Synthetic oligonucleotide
ccacctgctcagcctggggttgg

SEQ ID NO: 3124 - DNA, 23 bp, Artificial Sequence
  Description of Artificial Sequence: Synthetic oligonucleotide
cacctgctcagcctggggttggg

SEQ ID NO: 3125 - DNA, 23 bp, Artificial Sequence
  Description of Artificial Sequence: Synthetic oligonucleotide
gaggagccccccccaaccccagg

SEQ ID NO: 3126 - DNA, 23 bp, Artificial Sequence
  Description of Artificial Sequence: Synthetic oligonucleotide
acctgctcagcctggggttgggg

SEQ ID NO: 3127 - DNA, 23 bp, Artificial Sequence
  Description of Artificial Sequence: Synthetic oligonucleotide
cctgctcagcctggggttggggg

SEQ ID NO: 3128 - DNA, 23 bp, Artificial Sequence
  Description of Artificial Sequence: Synthetic oligonucleotide
ctgctcagcctggggttgggggg

SEQ ID NO: 3129 - DNA, 23 bp, Artificial Sequence
  Description of Artificial Sequence: Synthetic oligonucleotide
tgctcagcctggggttggggggg

SEQ ID NO: 3130 - DNA, 23 bp, Artificial Sequence
  Description of Artificial Sequence: Synthetic oligonucleotide
gctcagcctggggttgggggggg

SEQ ID NO: 3131 - DNA, 23 bp, Artificial Sequence
  Description of Artificial Sequence: Synthetic oligonucleotide
gcaaggaccagtcaaggaggagg

SEQ ID NO: 3132 - DNA, 23 bp, Artificial Sequence
  Description of Artificial Sequence: Synthetic oligonucleotide
aatgcaaggaccagtcaaggagg

SEQ ID NO: 3133 - DNA, 23 bp, Artificial Sequence
  Description of Artificial Sequence: Synthetic oligonucleotide
gggggctcctcctccttgactgg

SEQ ID NO: 3134 - DNA, 23 bp, Artificial Sequence
  Description of Artificial Sequence: Synthetic oligonucleotide
gcaaatgcaaggaccagtcaagg

SEQ ID NO: 3135 - DNA, 23 bp, Artificial Sequence
  Description of Artificial Sequence: Synthetic oligonucleotide
gctggatggaggcaaatgcaagg

SEQ ID NO: 3136 - DNA, 23 bp, Artificial Sequence
  Description of Artificial Sequence: Synthetic oligonucleotide
agcccagacaggctggatggagg

SEQ ID NO: 3137 - DNA, 23 bp, Artificial Sequence
  Description of Artificial Sequence: Synthetic oligonucleotide
gagagcccagacaggctggatgg

SEQ ID NO: 3138 - DNA, 23 bp, Artificial Sequence
  Description of Artificial Sequence: Synthetic oligonucleotide
ctcggagagcccagacaggctgg

SEQ ID NO: 3139 - DNA, 23 bp, Artificial Sequence
  Description of Artificial Sequence: Synthetic oligonucleotide
ttgcctccatccagcctgtctgg

SEQ ID NO: 3140 - DNA, 23 bp, Artificial Sequence
  Description of Artificial Sequence: Synthetic oligonucleotide
tgcctccatccagcctgtctggg

SEQ ID NO: 3141 - DNA, 23 bp, Artificial Sequence
  Description of Artificial Sequence: Synthetic oligonucleotide
ttgcctcggagagcccagacagg

SEQ ID NO: 3142 - DNA, 23 bp, Artificial Sequence
  Description of Artificial Sequence: Synthetic oligonucleotide
cagcctgtctgggctctccgagg

SEQ ID NO: 3143 - DNA, 23 bp, Artificial Sequence
  Description of Artificial Sequence: Synthetic oligonucleotide
gtctgggctctccgaggcaatgg

SEQ ID NO: 3144 - DNA, 23 bp, Artificial Sequence
  Description of Artificial Sequence: Synthetic oligonucleotide
cctgctggtctccattgcctcgg

SEQ ID NO: 3145 - DNA, 23 bp, Artificial Sequence
  Description of Artificial Sequence: Synthetic oligonucleotide
ccgaggcaatggagaccagcagg

SEQ ID NO: 3146 - DNA, 23 bp, Artificial Sequence
  Description of Artificial Sequence: Synthetic oligonucleotide
tgacccatcgtgactcctgctgg

SEQ ID NO: 3147 - DNA, 23 bp, Artificial Sequence
  Description of Artificial Sequence: Synthetic oligonucleotide
gagaccagcaggagtcacgatgg

SEQ ID NO: 3148 - DNA, 23 bp, Artificial Sequence
  Description of Artificial Sequence: Synthetic oligonucleotide
agaccagcaggagtcacgatggg

SEQ ID NO: 3149 - DNA, 23 bp, Artificial Sequence
  Description of Artificial Sequence: Synthetic oligonucleotide
agcaggagtcacgatgggtcagg

SEQ ID NO: 3150 - DNA, 23 bp, Artificial Sequence
  Description of Artificial Sequence: Synthetic oligonucleotide
gatgggtcaggagccccctttgg

SEQ ID NO: 3151 - DNA, 23 bp, Artificial Sequence
  Description of Artificial Sequence: Synthetic oligonucleotide
atgggtcaggagccccctttggg

SEQ ID NO: 3152 - DNA, 23 bp, Artificial Sequence
  Description of Artificial Sequence: Synthetic oligonucleotide
gcagggctgaggcccaaaggggg

SEQ ID NO: 3153 - DNA, 23 bp, Artificial Sequence
  Description of Artificial Sequence: Synthetic oligonucleotide
ggcagggctgaggcccaaagggg

SEQ ID NO: 3154 - DNA, 23 bp, Artificial Sequence
  Description of Artificial Sequence: Synthetic oligonucleotide
gggcagggctgaggcccaaaggg

SEQ ID NO: 3155 - DNA, 23 bp, Artificial Sequence
  Description of Artificial Sequence: Synthetic oligonucleotide
agggcagggctgaggcccaaagg

SEQ ID NO: 3156 - DNA, 23 bp, Artificial Sequence
  Description of Artificial Sequence: Synthetic oligonucleotide
tagggggcagggcagggctgagg

SEQ ID NO: 3157 - DNA, 23 bp, Artificial Sequence
  Description of Artificial Sequence: Synthetic oligonucleotide
ctactttagggggcagggcaggg

SEQ ID NO: 3158 - DNA, 23 bp, Artificial Sequence
  Description of Artificial Sequence: Synthetic oligonucleotide
gctactttagggggcagggcagg

SEQ ID NO: 3159 - DNA, 23 bp, Artificial Sequence
  Description of Artificial Sequence: Synthetic oligonucleotide
aagtgctactttagggggcaggg

SEQ ID NO: 3160 - DNA, 23 bp, Artificial Sequence
  Description of Artificial Sequence: Synthetic oligonucleotide
caagtgctactttagggggcagg

SEQ ID NO: 3161 - DNA, 23 bp, Artificial Sequence
  Description of Artificial Sequence: Synthetic oligonucleotide
tatccaagtgctactttaggggg

SEQ ID NO: 3162 - DNA, 23 bp, Artificial Sequence
  Description of Artificial Sequence: Synthetic oligonucleotide
ttatccaagtgctactttagggg

SEQ ID NO: 3163 - DNA, 23 bp, Artificial Sequence
  Description of Artificial Sequence: Synthetic oligonucleotide
cttatccaagtgctactttaggg

SEQ ID NO: 3164 - DNA, 23 bp, Artificial Sequence
  Description of Artificial Sequence: Synthetic oligonucleotide
gcttatccaagtgctactttagg

SEQ ID NO: 3165 - DNA, 23 bp, Artificial Sequence
  Description of Artificial Sequence: Synthetic oligonucleotide
ctgccccctaaagtagcacttgg

SEQ ID NO: 3166 - DNA, 23 bp, Artificial Sequence
  Description of Artificial Sequence: Synthetic oligonucleotide
attattatacttactatttatgg

SEQ ID NO: 3167 - DNA, 23 bp, Artificial Sequence
  Description of Artificial Sequence: Synthetic oligonucleotide
ttattatacttactatttatggg

SEQ ID NO: 3168 - DNA, 23 bp, Artificial Sequence
  Description of Artificial Sequence: Synthetic oligonucleotide
atacttactatttatgggtgtgg

SEQ ID NO: 3169 - DNA, 23 bp, Artificial Sequence
  Description of Artificial Sequence: Synthetic oligonucleotide
ctatttatgggtgtggtgaatgg

SEQ ID NO: 3170 - DNA, 23 bp, Artificial Sequence
  Description of Artificial Sequence: Synthetic oligonucleotide
tatttatgggtgtggtgaatggg

SEQ ID NO: 3171 - DNA, 23 bp, Artificial Sequence
  Description of Artificial Sequence: Synthetic oligonucleotide
tatgggtgtggtgaatgggatgg

SEQ ID NO: 3172 - DNA, 23 bp, Artificial Sequence
  Description of Artificial Sequence: Synthetic oligonucleotide
tgtggtgaatgggatggcaaagg

SEQ ID NO: 3173 - DNA, 23 bp, Artificial Sequence
  Description of Artificial Sequence: Synthetic oligonucleotide
gtttggtgatcagtaagacttgg

SEQ ID NO: 3174 - DNA, 23 bp, Artificial Sequence
  Description of Artificial Sequence: Synthetic oligonucleotide
ccaggatatatcttaaggtttgg

SEQ ID NO: 3175 - DNA, 23 bp, Artificial Sequence
  Description of Artificial Sequence: Synthetic oligonucleotide
agctgccaggatatatcttaagg

SEQ ID NO: 3176 - DNA, 23 bp, Artificial Sequence
  Description of Artificial Sequence: Synthetic oligonucleotide
ccaaaccttaagatatatcctgg

SEQ ID NO: 3177 - DNA, 23 bp, Artificial Sequence
  Description of Artificial Sequence: Synthetic oligonucleotide
ccaagggtctactagctgccagg

SEQ ID NO: 3178 - DNA, 23 bp, Artificial Sequence
  Description of Artificial Sequence: Synthetic oligonucleotide
cctggcagctagtagacccttgg

SEQ ID NO: 3179 - DNA, 23 bp, Artificial Sequence
  Description of Artificial Sequence: Synthetic oligonucleotide
ctggcagctagtagacccttggg

SEQ ID NO: 3180 - DNA, 23 bp, Artificial Sequence
  Description of Artificial Sequence: Synthetic oligonucleotide
tttctgttcatttagcccaaggg

SEQ ID NO: 3181 - DNA, 23 bp, Artificial Sequence
  Description of Artificial Sequence: Synthetic oligonucleotide
ttttctgttcatttagcccaagg

SEQ ID NO: 3182 - DNA, 23 bp, Artificial Sequence
  Description of Artificial Sequence: Synthetic oligonucleotide
gggctaaatgaacagaaaactgg

SEQ ID NO: 3183 - DNA, 23 bp, Artificial Sequence
  Description of Artificial Sequence: Synthetic oligonucleotide
ataaaaatgtaaactgtagtagg

SEQ ID NO: 3184 - DNA, 23 bp, Artificial Sequence
  Description of Artificial Sequence: Synthetic oligonucleotide
tacagtttacatttttataaagg

SEQ ID NO: 3185 - DNA, 23 bp, Artificial Sequence
  Description of Artificial Sequence: Synthetic oligonucleotide
agtagatttctaaaatcccgtgg

SEQ ID NO: 3186 - DNA, 23 bp, Artificial Sequence
  Description of Artificial Sequence: Synthetic oligonucleotide
gatttctaaaatcccgtggtagg

SEQ ID NO: 3187 - DNA, 23 bp, Artificial Sequence
  Description of Artificial Sequence: Synthetic oligonucleotide
aactcaagagagcctaccacggg

SEQ ID NO: 3188 - DNA, 23 bp, Artificial Sequence
  Description of Artificial Sequence: Synthetic oligonucleotide
aaactcaagagagcctaccacgg

SEQ ID NO: 3189 - DNA, 23 bp, Artificial Sequence
  Description of Artificial Sequence: Synthetic oligonucleotide
ttatttgtagctgaacttcaggg

SEQ ID NO: 3190 - DNA, 23 bp, Artificial Sequence
  Description of Artificial Sequence: Synthetic oligonucleotide
cttatttgtagctgaacttcagg

SEQ ID NO: 3191 - DNA, 23 bp, Artificial Sequence
  Description of Artificial Sequence: Synthetic oligonucleotide
tgagcatttactctgttgtcagg

SEQ ID NO: 3192 - DNA, 23 bp, Artificial Sequence
  Description of Artificial Sequence: Synthetic oligonucleotide
aacctaaagcactcggcacgggg

SEQ ID NO: 3193 - DNA, 23 bp, Artificial Sequence
  Description of Artificial Sequence: Synthetic oligonucleotide
gaacctaaagcactcggcacggg

SEQ ID NO: 3194 - DNA, 23 bp, Artificial Sequence
  Description of Artificial Sequence: Synthetic oligonucleotide
tgaacctaaagcactcggcacgg

SEQ ID NO: 3195 - DNA, 23 bp, Artificial Sequence
  Description of Artificial Sequence: Synthetic oligonucleotide
aattctgaacctaaagcactcgg

SEQ ID NO: 3196 - DNA, 23 bp, Artificial Sequence
  Description of Artificial Sequence: Synthetic oligonucleotide
ggccccgtgccgagtgctttagg

SEQ ID NO: 3197 - DNA, 23 bp, Artificial Sequence
  Description of Artificial Sequence: Synthetic oligonucleotide
catctcctagggctgctgtgggg

SEQ ID NO: 3198 - DNA, 23 bp, Artificial Sequence
  Description of Artificial Sequence: Synthetic oligonucleotide
tcatctcctagggctgctgtggg

SEQ ID NO: 3199 - DNA, 23 bp, Artificial Sequence
  Description of Artificial Sequence: Synthetic oligonucleotide
ttcatctcctagggctgctgtgg

SEQ ID NO: 3200 - DNA, 23 bp, Artificial Sequence
  Description of Artificial Sequence: Synthetic oligonucleotide
gtcatccccacagcagccctagg

SEQ ID NO: 3201 - DNA, 23 bp, Artificial Sequence
  Description of Artificial Sequence: Synthetic oligonucleotide
agaattgcattcatctcctaggg

SEQ ID NO: 3202 - DNA, 23 bp, Artificial Sequence
  Description of Artificial Sequence: Synthetic oligonucleotide
aagaattgcattcatctcctagg

SEQ ID NO: 3203 - DNA, 23 bp, Artificial Sequence
  Description of Artificial Sequence: Synthetic oligonucleotide
caacttccttatcagtcaagtgg

SEQ ID NO: 3204 - DNA, 23 bp, Artificial Sequence
  Description of Artificial Sequence: Synthetic oligonucleotide
ttatgtccacttgactgataagg

SEQ ID NO: 3205 - DNA, 23 bp, Artificial Sequence
  Description of Artificial Sequence: Synthetic oligonucleotide
cttgactgataaggaagttgagg

SEQ ID NO: 3206 - DNA, 23 bp, Artificial Sequence
  Description of Artificial Sequence: Synthetic oligonucleotide
aaggaagttgaggttcaaagagg

SEQ ID NO: 3207 - DNA, 23 bp, Artificial Sequence
  Description of Artificial Sequence: Synthetic oligonucleotide
agaggctaaatgactctcccagg

SEQ ID NO: 3208 - DNA, 23 bp, Artificial Sequence
  Description of Artificial Sequence: Synthetic oligonucleotide
gaggctaaatgactctcccaggg

SEQ ID NO: 3209 - DNA, 23 bp, Artificial Sequence
  Description of Artificial Sequence: Synthetic oligonucleotide
ctttccagctgtgggaccctggg

SEQ ID NO: 3210 - DNA, 23 bp, Artificial Sequence
  Description of Artificial Sequence: Synthetic oligonucleotide
actttccagctgtgggaccctgg

SEQ ID NO: 3211 - DNA, 23 bp, Artificial Sequence
  Description of Artificial Sequence: Synthetic oligonucleotide
ctctcccagggtcccacagctgg

SEQ ID NO: 3212 - DNA, 23 bp, Artificial Sequence
  Description of Artificial Sequence: Synthetic oligonucleotide
tgtggccactttccagctgtggg

SEQ ID NO: 3213 - DNA, 23 bp, Artificial Sequence
  Description of Artificial Sequence: Synthetic oligonucleotide
ctgtggccactttccagctgtgg

SEQ ID NO: 3214 - DNA, 23 bp, Artificial Sequence
  Description of Artificial Sequence: Synthetic oligonucleotide
agggtcccacagctggaaagtgg

SEQ ID NO: 3215 - DNA, 23 bp, Artificial Sequence
  Description of Artificial Sequence: Synthetic oligonucleotide
cacagctggaaagtggccacagg

SEQ ID NO: 3216 - DNA, 23 bp, Artificial Sequence
  Description of Artificial Sequence: Synthetic oligonucleotide
acagctggaaagtggccacaggg

SEQ ID NO: 3217 - DNA, 23 bp, Artificial Sequence
  Description of Artificial Sequence: Synthetic oligonucleotide
gaaaaccagctggggccctgtgg

SEQ ID NO: 3218 - DNA, 23 bp, Artificial Sequence
  Description of Artificial Sequence: Synthetic oligonucleotide
agtggccacagggccccagctgg

SEQ ID NO: 3219 - DNA, 23 bp, Artificial Sequence
  Description of Artificial Sequence: Synthetic oligonucleotide
ctgccctagaaaaccagctgggg

SEQ ID NO: 3220 - DNA, 23 bp, Artificial Sequence
  Description of Artificial Sequence: Synthetic oligonucleotide
gctgccctagaaaaccagctggg

SEQ ID NO: 3221 - DNA, 23 bp, Artificial Sequence
  Description of Artificial Sequence: Synthetic oligonucleotide
tgctgccctagaaaaccagctgg

SEQ ID NO: 3222 - DNA, 23 bp, Artificial Sequence
  Description of Artificial Sequence: Synthetic oligonucleotide
agggccccagctggttttctagg

SEQ ID NO: 3223 - DNA, 23 bp, Artificial Sequence
  Description of Artificial Sequence: Synthetic oligonucleotide
gggccccagctggttttctaggg

SEQ ID NO: 3224 - DNA, 23 bp, Artificial Sequence
  Description of Artificial Sequence: Synthetic oligonucleotide
agctggttttctagggcagcagg

SEQ ID NO: 3225 - DNA, 23 bp, Artificial Sequence
  Description of Artificial Sequence: Synthetic oligonucleotide
tttctagggcagcaggcagaagg

SEQ ID NO: 3226 - DNA, 23 bp, Artificial Sequence
  Description of Artificial Sequence: Synthetic oligonucleotide
agggcagcaggcagaaggcgagg

SEQ ID NO: 3227 - DNA, 23 bp, Artificial Sequence
  Description of Artificial Sequence: Synthetic oligonucleotide
gcagcaggcagaaggcgaggagg

SEQ ID NO: 3228 - DNA, 23 bp, Artificial Sequence
  Description of Artificial Sequence: Synthetic oligonucleotide
ggcagaaggcgaggaggatctgg

SEQ ID NO: 3229 - DNA, 23 bp, Artificial Sequence
  Description of Artificial Sequence: Synthetic oligonucleotide
gcagaaggcgaggaggatctggg

SEQ ID NO: 3230 - DNA, 23 bp, Artificial Sequence
  Description of Artificial Sequence: Synthetic oligonucleotide
cgaggaggatctgggccctgtgg

SEQ ID NO: 3231 - DNA, 23 bp, Artificial Sequence
  Description of Artificial Sequence: Synthetic oligonucleotide
gatgaggctggggcaccacaggg

SEQ ID NO: 3232 - DNA, 23 bp, Artificial Sequence
  Description of Artificial Sequence: Synthetic oligonucleotide
agatgaggctggggcaccacagg

SEQ ID NO: 3233 - DNA, 23 bp, Artificial Sequence
  Description of Artificial Sequence: Synthetic oligonucleotide
aggaccctcagatgaggctgggg

SEQ ID NO: 3234 - DNA, 23 bp, Artificial Sequence
  Description of Artificial Sequence: Synthetic oligonucleotide
gaggaccctcagatgaggctggg

SEQ ID NO: 3235 - DNA, 23 bp, Artificial Sequence
  Description of Artificial Sequence: Synthetic oligonucleotide
tgaggaccctcagatgaggctgg

SEQ ID NO: 3236 - DNA, 23 bp, Artificial Sequence
  Description of Artificial Sequence: Synthetic oligonucleotide
tggtgccccagcctcatctgagg

SEQ ID NO: 3237 - DNA, 23 bp, Artificial Sequence
  Description of Artificial Sequence: Synthetic oligonucleotide
cagatgaggaccctcagatgagg

SEQ ID NO: 3238 - DNA, 23 bp, Artificial Sequence
  Description of Artificial Sequence: Synthetic oligonucleotide
ggtgccccagcctcatctgaggg

SEQ ID NO: 3239 - DNA, 23 bp, Artificial Sequence
  Description of Artificial Sequence: Synthetic oligonucleotide
ggatcctgttctctcagatgagg

SEQ ID NO: 3240 - DNA, 23 bp, Artificial Sequence
  Description of Artificial Sequence: Synthetic oligonucleotide
gggtcctcatctgagagaacagg

SEQ ID NO: 3241 - DNA, 23 bp, Artificial Sequence
  Description of Artificial Sequence: Synthetic oligonucleotide
tgcagcctgcccatgctgtgagg

SEQ ID NO: 3242 - DNA, 23 bp, Artificial Sequence
  Description of Artificial Sequence: Synthetic oligonucleotide
agaacaggatcctcacagcatgg

SEQ ID NO: 3243 - DNA, 23 bp, Artificial Sequence
  Description of Artificial Sequence: Synthetic oligonucleotide
gaacaggatcctcacagcatggg

SEQ ID NO: 3244 - DNA, 23 bp, Artificial Sequence
  Description of Artificial Sequence: Synthetic oligonucleotide
aggatcctcacagcatgggcagg

SEQ ID NO: 3245 - DNA, 23 bp, Artificial Sequence
  Description of Artificial Sequence: Synthetic oligonucleotide
cagcatgggcaggctgcaagtgg

SEQ ID NO: 3246 - DNA, 23 bp, Artificial Sequence
  Description of Artificial Sequence: Synthetic oligonucleotide
caggctgcaagtggtccctgagg

SEQ ID NO: 3247 - DNA, 23 bp, Artificial Sequence
  Description of Artificial Sequence: Synthetic oligonucleotide
tccactccacgataacctcaggg

SEQ ID NO: 3248 - DNA, 23 bp, Artificial Sequence
  Description of Artificial Sequence: Synthetic oligonucleotide
gtccactccacgataacctcagg

SEQ ID NO: 3249 - DNA, 23 bp, Artificial Sequence
  Description of Artificial Sequence: Synthetic oligonucleotide
agtggtccctgaggttatcgtgg

SEQ ID NO: 3250 - DNA, 23 bp, Artificial Sequence
  Description of Artificial Sequence: Synthetic oligonucleotide
tccctgaggttatcgtggagtgg

SEQ ID NO: 3251 - DNA, 23 bp, Artificial Sequence
  Description of Artificial Sequence: Synthetic oligonucleotide
aacagactcaggtcaagtcaggg

SEQ ID NO: 3252 - DNA, 23 bp, Artificial Sequence
  Description of Artificial Sequence: Synthetic oligonucleotide
aaacagactcaggtcaagtcagg

SEQ ID NO: 3253 - DNA, 23 bp, Artificial Sequence
  Description of Artificial Sequence: Synthetic oligonucleotide
tgacttgacctgagtctgtttgg

SEQ ID NO: 3254 - DNA, 23 bp, Artificial Sequence
  Description of Artificial Sequence: Synthetic oligonucleotide
ggccaaggcccccggaggcctgg

SEQ ID NO: 3255 - DNA, 23 bp, Artificial Sequence
  Description of Artificial Sequence: Synthetic oligonucleotide
ggcagggccaaggcccccggagg

SEQ ID NO: 3256 - DNA, 23 bp, Artificial Sequence
  Description of Artificial Sequence: Synthetic oligonucleotide
ccaggcagggccaaggcccccgg

SEQ ID NO: 3257 - DNA, 23 bp, Artificial Sequence
  Description of Artificial Sequence: Synthetic oligonucleotide
ggccaggcctccgggggccttgg

SEQ ID NO: 3258 - DNA, 23 bp, Artificial Sequence
  Description of Artificial Sequence: Synthetic oligonucleotide
tggtgggccaggcagggccaagg

SEQ ID NO: 3259 - DNA, 23 bp, Artificial Sequence
  Description of Artificial Sequence: Synthetic oligonucleotide
ccgggggccttggccctgcctgg

SEQ ID NO: 3260 - DNA, 23 bp, Artificial Sequence
  Description of Artificial Sequence: Synthetic oligonucleotide
aagagatggtgggccaggcaggg

SEQ ID NO: 3261 - DNA, 23 bp, Artificial Sequence
  Description of Artificial Sequence: Synthetic oligonucleotide
gaagagatggtgggccaggcagg

SEQ ID NO: 3262 - DNA, 23 bp, Artificial Sequence
  Description of Artificial Sequence: Synthetic oligonucleotide
ggcagaagagatggtgggccagg

SEQ ID NO: 3263 - DNA, 23 bp, Artificial Sequence
  Description of Artificial Sequence: Synthetic oligonucleotide
aggatggcagaagagatggtggg

SEQ ID NO: 3264 - DNA, 23 bp, Artificial Sequence
  Description of Artificial Sequence: Synthetic oligonucleotide
aaggatggcagaagagatggtgg

SEQ ID NO: 3265 - DNA, 23 bp, Artificial Sequence
  Description of Artificial Sequence: Synthetic oligonucleotide
acaaaggatggcagaagagatgg

SEQ ID NO: 3266 - DNA, 23 bp, Artificial Sequence
  Description of Artificial Sequence: Synthetic oligonucleotide
ccctcccccgccacaaaggatgg

SEQ ID NO: 3267 - DNA, 23 bp, Artificial Sequence
  Description of Artificial Sequence: Synthetic oligonucleotide
atctcttctgccatcctttgtgg

SEQ ID NO: 3268 - DNA, 23 bp, Artificial Sequence
  Description of Artificial Sequence: Synthetic oligonucleotide
tcttctgccatcctttgtggcgg

SEQ ID NO: 3269 - DNA, 23 bp, Artificial Sequence
  Description of Artificial Sequence: Synthetic oligonucleotide
tttcccctcccccgccacaaagg

SEQ ID NO: 3270 - DNA, 23 bp, Artificial Sequence
  Description of Artificial Sequence: Synthetic oligonucleotide
cttctgccatcctttgtggcggg

SEQ ID NO: 3271 - DNA, 23 bp, Artificial Sequence
  Description of Artificial Sequence: Synthetic oligonucleotide
ttctgccatcctttgtggcgggg

SEQ ID NO: 3272 - DNA, 23 bp, Artificial Sequence
  Description of Artificial Sequence: Synthetic oligonucleotide
tctgccatcctttgtggcggggg

SEQ ID NO: 3273 - DNA, 23 bp, Artificial Sequence
  Description of Artificial Sequence: Synthetic oligonucleotide
gccatcctttgtggcgggggagg

SEQ ID NO: 3274 - DNA, 23 bp, Artificial Sequence
  Description of Artificial Sequence: Synthetic oligonucleotide
ccatcctttgtggcgggggaggg

SEQ ID NO: 3275 - DNA, 23 bp, Artificial Sequence
  Description of Artificial Sequence: Synthetic oligonucleotide
catcctttgtggcgggggagggg

SEQ ID NO: 3276 - DNA, 23 bp, Artificial Sequence
  Description of Artificial Sequence: Synthetic oligonucleotide
aggggaaattcagagatctttgg

SEQ ID NO: 3277 - DNA, 23 bp, Artificial Sequence
  Description of Artificial Sequence: Synthetic oligonucleotide
ggggaaattcagagatctttggg

SEQ ID NO: 3278 - DNA, 23 bp, Artificial Sequence
  Description of Artificial Sequence: Synthetic oligonucleotide
ctttgggcgacttccctgcctgg

SEQ ID NO: 3279 - DNA, 23 bp, Artificial Sequence
  Description of Artificial Sequence: Synthetic oligonucleotide
ctgtgagctgggtccaggcaggg

SEQ ID NO: 3280 - DNA, 23 bp, Artificial Sequence
  Description of Artificial Sequence: Synthetic oligonucleotide
gctgtgagctgggtccaggcagg

SEQ ID NO: 3281 - DNA, 23 bp, Artificial Sequence
  Description of Artificial Sequence: Synthetic oligonucleotide
agaagctgtgagctgggtccagg

SEQ ID NO: 3282 - DNA, 23 bp, Artificial Sequence
  Description of Artificial Sequence: Synthetic oligonucleotide
tggccgagaagctgtgagctggg

SEQ ID NO: 3283 - DNA, 23 bp, Artificial Sequence
  Description of Artificial Sequence: Synthetic oligonucleotide
gtggccgagaagctgtgagctgg

SEQ ID NO: 3284 - DNA, 23 bp, Artificial Sequence
  Description of Artificial Sequence: Synthetic oligonucleotide
ggacccagctcacagcttctcgg

SEQ ID NO: 3285 - DNA, 23 bp, Artificial Sequence
  Description of Artificial Sequence: Synthetic oligonucleotide
cacaacccacacatttgcagtgg

SEQ ID NO: 3286 - DNA, 23 bp, Artificial Sequence
  Description of Artificial Sequence: Synthetic oligonucleotide
tctcggccactgcaaatgtgtgg

SEQ ID NO: 3287 - DNA, 23 bp, Artificial Sequence
  Description of Artificial Sequence: Synthetic oligonucleotide
ctcggccactgcaaatgtgtggg

SEQ ID NO: 3288 - DNA, 23 bp, Artificial Sequence
  Description of Artificial Sequence: Synthetic oligonucleotide
aagctcaagacacatcagtctgg

SEQ ID NO: 3289 - DNA, 23 bp, Artificial Sequence
  Description of Artificial Sequence: Synthetic oligonucleotide
actgatgtgtcttgagcttcagg

SEQ ID NO: 3290 - DNA, 23 bp, Artificial Sequence
  Description of Artificial Sequence: Synthetic oligonucleotide
cttcaggcttgcaagtgcagtgg

SEQ ID NO: 3291 - DNA, 23 bp, Artificial Sequence
  Description of Artificial Sequence: Synthetic oligonucleotide
ggcttgcaagtgcagtggagagg

SEQ ID NO: 3292 - DNA, 23 bp, Artificial Sequence
  Description of Artificial Sequence: Synthetic oligonucleotide
caagtgcagtggagaggcagtgg

SEQ ID NO: 3293 - DNA, 23 bp, Artificial Sequence
  Description of Artificial Sequence: Synthetic oligonucleotide
aagtgcagtggagaggcagtggg

SEQ ID NO: 3294 - DNA, 23 bp, Artificial Sequence
  Description of Artificial Sequence: Synthetic oligonucleotide
agtgcagtggagaggcagtgggg

SEQ ID NO: 3295 - DNA, 23 bp, Artificial Sequence
  Description of Artificial Sequence: Synthetic oligonucleotide
aggcagtggggagctattgaagg

SEQ ID NO: 3296 - DNA, 23 bp, Artificial Sequence
  Description of Artificial Sequence: Synthetic oligonucleotide
ggcagtggggagctattgaaggg

SEQ ID NO: 3297 - DNA, 23 bp, Artificial Sequence
  Description of Artificial Sequence: Synthetic oligonucleotide
gcagtggggagctattgaagggg

SEQ ID NO: 3298 - DNA, 23 bp, Artificial Sequence
  Description of Artificial Sequence: Synthetic oligonucleotide
ggggagctattgaaggggtctgg

SEQ ID NO: 3299 - DNA, 23 bp, Artificial Sequence
  Description of Artificial Sequence: Synthetic oligonucleotide
gggagctattgaaggggtctggg

SEQ ID NO: 3300 - DNA, 23 bp, Artificial Sequence
  Description of Artificial Sequence: Synthetic oligonucleotide
ggagctattgaaggggtctgggg

SEQ ID NO: 3301 - DNA, 23 bp, Artificial Sequence
  Description of Artificial Sequence: Synthetic oligonucleotide
ggggacagactcaatcacagagg

SEQ ID NO: 3302 - DNA, 23 bp, Artificial Sequence
  Description of Artificial Sequence: Synthetic oligonucleotide
cagcaggcagatcttctgaaagg

SEQ ID NO: 3303 - DNA, 23 bp, Artificial Sequence
  Description of Artificial Sequence: Synthetic oligonucleotide
cctctttgcccatgcacagcagg

SEQ ID NO: 3304 - DNA, 23 bp, Artificial Sequence
  Description of Artificial Sequence: Synthetic oligonucleotide
gaagatctgcctgctgtgcatgg

SEQ ID NO: 3305 - DNA, 23 bp, Artificial Sequence
  Description of Artificial Sequence: Synthetic oligonucleotide
aagatctgcctgctgtgcatggg

SEQ ID NO: 3306 - DNA, 23 bp, Artificial Sequence
  Description of Artificial Sequence: Synthetic oligonucleotide
cctgctgtgcatgggcaaagagg

SEQ ID NO: 3307 - DNA, 23 bp, Artificial Sequence
  Description of Artificial Sequence: Synthetic oligonucleotide
ctgctgtgcatgggcaaagaggg

SEQ ID NO: 3308 - DNA, 23 bp, Artificial Sequence
  Description of Artificial Sequence: Synthetic oligonucleotide
catgctctgaggtcagcaagtgg

SEQ ID NO: 3309 - DNA, 23 bp, Artificial Sequence
  Description of Artificial Sequence: Synthetic oligonucleotide
ctgagaaagcacatgctctgagg

SEQ ID NO: 3310 - DNA, 23 bp, Artificial Sequence
  Description of Artificial Sequence: Synthetic oligonucleotide
cagtgaccatgggacagcttggg

SEQ ID NO: 3311 - DNA, 23 bp, Artificial Sequence
  Description of Artificial Sequence: Synthetic oligonucleotide
tcagtgaccatgggacagcttgg

SEQ ID NO: 3312 - DNA, 23 bp, Artificial Sequence
  Description of Artificial Sequence: Synthetic oligonucleotide
gtagtgcccaagctgtcccatgg

SEQ ID NO: 3313 - DNA, 23 bp, Artificial Sequence
  Description of Artificial Sequence: Synthetic oligonucleotide
ctaactgggtcagtgaccatggg

SEQ ID NO: 3314 - DNA, 23 bp, Artificial Sequence
  Description of Artificial Sequence: Synthetic oligonucleotide
tctaactgggtcagtgaccatgg

SEQ ID NO: 3315 - DNA, 23 bp, Artificial Sequence
  Description of Artificial Sequence: Synthetic oligonucleotide
tccattcagtcattctaactggg

SEQ ID NO: 3316 - DNA, 23 bp, Artificial Sequence
  Description of Artificial Sequence: Synthetic oligonucleotide
gtccattcagtcattctaactgg

SEQ ID NO: 3317 - DNA, 23 bp, Artificial Sequence
  Description of Artificial Sequence: Synthetic oligonucleotide
acccagttagaatgactgaatgg

SEQ ID NO: 3318 - DNA, 23 bp, Artificial Sequence
  Description of Artificial Sequence: Synthetic oligonucleotide
tagaatgactgaatggactttgg

SEQ ID NO: 3319 - DNA, 23 bp, Artificial Sequence
  Description of Artificial Sequence: Synthetic oligonucleotide
actttggcttgtgtctcattagg

SEQ ID NO: 3320 - DNA, 23 bp, Artificial Sequence
  Description of Artificial Sequence: Synthetic oligonucleotide
tggaagactagaatggggctagg

SEQ ID NO: 3321 - DNA, 23 bp, Artificial Sequence
  Description of Artificial Sequence: Synthetic oligonucleotide
ctcactggaagactagaatgggg

SEQ ID NO: 3322 - DNA, 23 bp, Artificial Sequence
  Description of Artificial Sequence: Synthetic oligonucleotide
tctcactggaagactagaatggg

SEQ ID NO: 3323 - DNA, 23 bp, Artificial Sequence
  Description of Artificial Sequence: Synthetic oligonucleotide
atctcactggaagactagaatgg

SEQ ID NO: 3324 - DNA, 23 bp, Artificial Sequence
  Description of Artificial Sequence: Synthetic oligonucleotide
cactcatggacagatctcactgg

SEQ ID NO: 3325 - DNA, 23 bp, Artificial Sequence
  Description of Artificial Sequence: Synthetic oligonucleotide
ctgtgagattccttcactcatgg

SEQ ID NO: 3326 - DNA, 23 bp, Artificial Sequence
  Description of Artificial Sequence: Synthetic oligonucleotide
tgagatctgtccatgagtgaagg

SEQ ID NO: 3327 - DNA, 23 bp, Artificial Sequence
  Description of Artificial Sequence: Synthetic oligonucleotide
catgagtgaaggaatctcacagg

SEQ ID NO: 3328 - DNA, 23 bp, Artificial Sequence
  Description of Artificial Sequence: Synthetic oligonucleotide
gaaaaaacaaaatgcttctatgg

SEQ ID NO: 3329 - DNA, 23 bp, Artificial Sequence
  Description of Artificial Sequence: Synthetic oligonucleotide
aaaaaacaaaatgcttctatggg

SEQ ID NO: 3330 - DNA, 23 bp, Artificial Sequence
  Description of Artificial Sequence: Synthetic oligonucleotide
acaaaatgcttctatgggtgtgg

SEQ ID NO: 3331 - DNA, 23 bp, Artificial Sequence
  Description of Artificial Sequence: Synthetic oligonucleotide
gcttctatgggtgtggttgctgg

SEQ ID NO: 3332 - DNA, 23 bp, Artificial Sequence
  Description of Artificial Sequence: Synthetic oligonucleotide
tggcttctgtggtgtagataagg

SEQ ID NO: 3333 - DNA, 23 bp, Artificial Sequence
  Description of Artificial Sequence: Synthetic oligonucleotide
agtctgtgtgatggcttctgtgg

SEQ ID NO: 3334 - DNA, 23 bp, Artificial Sequence
  Description of Artificial Sequence: Synthetic oligonucleotide
aagaaagacagtctgtgtgatgg

SEQ ID NO: 3335 - DNA, 23 bp, Artificial Sequence
  Description of Artificial Sequence: Synthetic oligonucleotide
tcagggcacattctaacaatggg

SEQ ID NO: 3336 - DNA, 23 bp, Artificial Sequence
  Description of Artificial Sequence: Synthetic oligonucleotide
gtcagggcacattctaacaatgg

SEQ ID NO: 3337 - DNA, 23 bp, Artificial Sequence
  Description of Artificial Sequence: Synthetic oligonucleotide
ccctgtgggctgcttggtcaggg

SEQ ID NO: 3338 - DNA, 23 bp, Artificial Sequence
  Description of Artificial Sequence: Synthetic oligonucleotide
gccctgtgggctgcttggtcagg

SEQ ID NO: 3339 - DNA, 23 bp, Artificial Sequence
  Description of Artificial Sequence: Synthetic oligonucleotide
cccaggccctgtgggctgcttgg

SEQ ID NO: 3340 - DNA, 23 bp, Artificial Sequence
  Description of Artificial Sequence: Synthetic oligonucleotide
gccctgaccaagcagcccacagg

SEQ ID NO: 3341 - DNA, 23 bp, Artificial Sequence
  Description of Artificial Sequence: Synthetic oligonucleotide
ccctgaccaagcagcccacaggg

SEQ ID NO: 3342 - DNA, 23 bp, Artificial Sequence
  Description of Artificial Sequence: Synthetic oligonucleotide
gcctctgtcccaggccctgtggg

SEQ ID NO: 3343 - DNA, 23 bp, Artificial Sequence
  Description of Artificial Sequence: Synthetic oligonucleotide
agcctctgtcccaggccctgtgg

SEQ ID NO: 3344 - DNA, 23 bp, Artificial Sequence
  Description of Artificial Sequence: Synthetic oligonucleotide
accaagcagcccacagggcctgg

SEQ ID NO: 3345 - DNA, 23 bp, Artificial Sequence
  Description of Artificial Sequence: Synthetic oligonucleotide
ccaagcagcccacagggcctggg

SEQ ID NO: 3346 - DNA, 23 bp, Artificial Sequence
  Description of Artificial Sequence: Synthetic oligonucleotide
cagagatcagcctctgtcccagg

SEQ ID NO: 3347 - DNA, 23 bp, Artificial Sequence
  Description of Artificial Sequence: Synthetic oligonucleotide
gcccacagggcctgggacagagg

SEQ ID NO: 3348 - DNA, 23 bp, Artificial Sequence
  Description of Artificial Sequence: Synthetic oligonucleotide
gaggagaggtgagctcagttagg

SEQ ID NO: 3349 - DNA, 23 bp, Artificial Sequence
  Description of Artificial Sequence: Synthetic oligonucleotide
gtcaggaggagagggaggagagg

SEQ ID NO: 3350 - DNA, 23 bp, Artificial Sequence
  Description of Artificial Sequence: Synthetic oligonucleotide
aaccagtcaggaggagagggagg

SEQ ID NO: 3351 - DNA, 23 bp, Artificial Sequence
  Description of Artificial Sequence: Synthetic oligonucleotide
tctaaccagtcaggaggagaggg

SEQ ID NO: 3352 - DNA, 23 bp, Artificial Sequence
  Description of Artificial Sequence: Synthetic oligonucleotide
atctaaccagtcaggaggagagg

SEQ ID NO: 3353 - DNA, 23 bp, Artificial Sequence
  Description of Artificial Sequence: Synthetic oligonucleotide
ctcctccctctcctcctgactgg

SEQ ID NO: 3354 - DNA, 23 bp, Artificial Sequence
  Description of Artificial Sequence: Synthetic oligonucleotide
agaaaatctaaccagtcaggagg

SEQ ID NO: 3355 - DNA, 23 bp, Artificial Sequence
  Description of Artificial Sequence: Synthetic oligonucleotide
cctagaaaatctaaccagtcagg

SEQ ID NO: 3356 - DNA, 23 bp, Artificial Sequence
  Description of Artificial Sequence: Synthetic oligonucleotide
cctgactggttagattttctagg

SEQ ID NO: 3357 - DNA, 23 bp, Artificial Sequence
  Description of Artificial Sequence: Synthetic oligonucleotide
cagcgggcttgtgtcatcagggg

SEQ ID NO: 3358 - DNA, 23 bp, Artificial Sequence
  Description of Artificial Sequence: Synthetic oligonucleotide
ccagcgggcttgtgtcatcaggg

SEQ ID NO: 3359 - DNA, 23 bp, Artificial Sequence
  Description of Artificial Sequence: Synthetic oligonucleotide
cccagcgggcttgtgtcatcagg

SEQ ID NO: 3360 - DNA, 23 bp, Artificial Sequence
  Description of Artificial Sequence: Synthetic oligonucleotide
ccctgatgacacaagcccgctgg

SEQ ID NO: 3361 - DNA, 23 bp, Artificial Sequence
  Description of Artificial Sequence: Synthetic oligonucleotide
cctgatgacacaagcccgctggg

SEQ ID NO: 3362 - DNA, 23 bp, Artificial Sequence
  Description of Artificial Sequence: Synthetic oligonucleotide
aaacactgctggggcccagcggg

SEQ ID NO: 3363 - DNA, 23 bp, Artificial Sequence
  Description of Artificial Sequence: Synthetic oligonucleotide
taaacactgctggggcccagcgg

SEQ ID NO: 3364 - DNA, 23 bp, Artificial Sequence
  Description of Artificial Sequence: Synthetic oligonucleotide
aacccctctaaacactgctgggg

SEQ ID NO: 3365 - DNA, 23 bp, Artificial Sequence
  Description of Artificial Sequence: Synthetic oligonucleotide
caacccctctaaacactgctggg

SEQ ID NO: 3366 - DNA, 23 bp, Artificial Sequence
  Description of Artificial Sequence: Synthetic oligonucleotide
acaacccctctaaacactgctgg

SEQ ID NO: 3367 - DNA, 23 bp, Artificial Sequence
  Description of Artificial Sequence: Synthetic oligonucleotide
tgggccccagcagtgtttagagg

SEQ ID NO: 3368 - DNA, 23 bp, Artificial Sequence
  Description of Artificial Sequence: Synthetic oligonucleotide
gggccccagcagtgtttagaggg

SEQ ID NO: 3369 - DNA, 23 bp, Artificial Sequence
  Description of Artificial Sequence: Synthetic oligonucleotide
ggccccagcagtgtttagagggg

SEQ ID NO: 3370 - DNA, 23 bp, Artificial Sequence
  Description of Artificial Sequence: Synthetic oligonucleotide
agggcatgacacacatcagcagg

SEQ ID NO: 3371 - DNA, 23 bp, Artificial Sequence
  Description of Artificial Sequence: Synthetic oligonucleotide
tgctgatgtgtgtcatgccctgg

SEQ ID NO: 3372 - DNA, 23 bp, Artificial Sequence
  Description of Artificial Sequence: Synthetic oligonucleotide
gctgatgtgtgtcatgccctggg

SEQ ID NO: 3373 - DNA, 23 bp, Artificial Sequence
  Description of Artificial Sequence: Synthetic oligonucleotide
ctgatgtgtgtcatgccctgggg

SEQ ID NO: 3374 - DNA, 23 bp, Artificial Sequence
  Description of Artificial Sequence: Synthetic oligonucleotide
atgtgtgtcatgccctggggtgg

SEQ ID NO: 3375 - DNA, 23 bp, Artificial Sequence
  Description of Artificial Sequence: Synthetic oligonucleotide
tttatcattcatccaccccaggg

SEQ ID NO: 3376 - DNA, 23 bp, Artificial Sequence
  Description of Artificial Sequence: Synthetic oligonucleotide
atttatcattcatccaccccagg

SEQ ID NO: 3377 - DNA, 23 bp, Artificial Sequence
  Description of Artificial Sequence: Synthetic oligonucleotide
cctccagggacaatctaacaggg

SEQ ID NO: 3378 - DNA, 23 bp, Artificial Sequence
  Description of Artificial Sequence: Synthetic oligonucleotide
gcctccagggacaatctaacagg

SEQ ID NO: 3379 - DNA, 23 bp, Artificial Sequence
  Description of Artificial Sequence: Synthetic oligonucleotide
catccctgttagattgtccctgg

SEQ ID NO: 3380 - DNA, 23 bp, Artificial Sequence
  Description of Artificial Sequence: Synthetic oligonucleotide
ccctgttagattgtccctggagg

SEQ ID NO: 3381 - DNA, 23 bp, Artificial Sequence
  Description of Artificial Sequence: Synthetic oligonucleotide
gggtggggaagctgcctccaggg

SEQ ID NO: 3382 - DNA, 23 bp, Artificial Sequence
  Description of Artificial Sequence: Synthetic oligonucleotide
ggggtggggaagctgcctccagg

SEQ ID NO: 3383 - DNA, 23 bp, Artificial Sequence
  Description of Artificial Sequence: Synthetic oligonucleotide
ttgtggaggtgacaggggtgggg

SEQ ID NO: 3384 - DNA, 23 bp, Artificial Sequence
  Description of Artificial Sequence: Synthetic oligonucleotide
gttgtggaggtgacaggggtggg

SEQ ID NO: 3385 - DNA, 23 bp, Artificial Sequence
  Description of Artificial Sequence: Synthetic oligonucleotide
tgttgtggaggtgacaggggtgg

SEQ ID NO: 3386 - DNA, 23 bp, Artificial Sequence
  Description of Artificial Sequence: Synthetic oligonucleotide
gagtgttgtggaggtgacagggg

SEQ ID NO: 3387 - DNA, 23 bp, Artificial Sequence
  Description of Artificial Sequence: Synthetic oligonucleotide
agagtgttgtggaggtgacaggg

SEQ ID NO: 3388 - DNA, 23 bp, Artificial Sequence
  Description of Artificial Sequence: Synthetic oligonucleotide
gagagtgttgtggaggtgacagg

SEQ ID NO: 3389 - DNA, 23 bp, Artificial Sequence
  Description of Artificial Sequence: Synthetic oligonucleotide
taaatcggagagtgttgtggagg

SEQ ID NO: 3390 - DNA, 23 bp, Artificial Sequence
  Description of Artificial Sequence: Synthetic oligonucleotide
ctgtaaatcggagagtgttgtgg

SEQ ID NO: 3391 - DNA, 23 bp, Artificial Sequence
  Description of Artificial Sequence: Synthetic oligonucleotide
tcccatggggtgctgtaaatcgg

SEQ ID NO: 3392 - DNA, 23 bp, Artificial Sequence
  Description of Artificial Sequence: Synthetic oligonucleotide
ctccgatttacagcaccccatgg

SEQ ID NO: 3393 - DNA, 23 bp, Artificial Sequence
  Description of Artificial Sequence: Synthetic oligonucleotide
tccgatttacagcaccccatggg

SEQ ID NO: 3394 - DNA, 23 bp, Artificial Sequence
  Description of Artificial Sequence: Synthetic oligonucleotide
ggaagttctaatgtcccatgggg

SEQ ID NO: 3395 - DNA, 23 bp, Artificial Sequence
  Description of Artificial Sequence: Synthetic oligonucleotide
tggaagttctaatgtcccatggg

SEQ ID NO: 3396 - DNA, 23 bp, Artificial Sequence
  Description of Artificial Sequence: Synthetic oligonucleotide
gtggaagttctaatgtcccatgg

SEQ ID NO: 3397 - DNA, 23 bp, Artificial Sequence
  Description of Artificial Sequence: Synthetic oligonucleotide
ctgcttttggttgagctgagtgg

SEQ ID NO: 3398 - DNA, 23 bp, Artificial Sequence
  Description of Artificial Sequence: Synthetic oligonucleotide
gctgaagtcacatctgcttttgg

SEQ ID NO: 3399 - DNA, 23 bp, Artificial Sequence
  Description of Artificial Sequence: Synthetic oligonucleotide
gacttcagcagaaacttcagagg

SEQ ID NO: 3400 - DNA, 23 bp, Artificial Sequence
  Description of Artificial Sequence: Synthetic oligonucleotide
agaggctctgttgtttcattagg

SEQ ID NO: 3401 - DNA, 23 bp, Artificial Sequence
  Description of Artificial Sequence: Synthetic oligonucleotide
ggcagtgcagagaatgcctttgg

SEQ ID NO: 3402 - DNA, 23 bp, Artificial Sequence
  Description of Artificial Sequence: Synthetic oligonucleotide
gcagtgcagagaatgcctttggg

SEQ ID NO: 3403 - DNA, 23 bp, Artificial Sequence
  Description of Artificial Sequence: Synthetic oligonucleotide
cagtgcagagaatgcctttgggg

SEQ ID NO: 3404 - DNA, 23 bp, Artificial Sequence
  Description of Artificial Sequence: Synthetic oligonucleotide
tctgaggaacggctccccaaagg

SEQ ID NO: 3405 - DNA, 23 bp, Artificial Sequence
  Description of Artificial Sequence: Synthetic oligonucleotide
aagtcttgagttctgaggaacgg

SEQ ID NO: 3406 - DNA, 23 bp, Artificial Sequence
  Description of Artificial Sequence: Synthetic oligonucleotide
atgtcaagtcttgagttctgagg

SEQ ID NO: 3407 - DNA, 23 bp, Artificial Sequence
  Description of Artificial Sequence: Synthetic oligonucleotide
agaactcaagacttgacatctgg

SEQ ID NO: 3408 - DNA, 23 bp, Artificial Sequence
  Description of Artificial Sequence: Synthetic oligonucleotide
gaactcaagacttgacatctggg

SEQ ID NO: 3409 - DNA, 23 bp, Artificial Sequence
  Description of Artificial Sequence: Synthetic oligonucleotide
ctcaagacttgacatctgggagg

SEQ ID NO: 3410 - DNA, 23 bp, Artificial Sequence
  Description of Artificial Sequence: Synthetic oligonucleotide
aagtcttgagttctgaggaacgg

SEQ ID NO: 3411 - DNA, 23 bp, Artificial Sequence
  Description of Artificial Sequence: Synthetic oligonucleotide
atgtcaagtcttgagttctgagg

SEQ ID NO: 3412 - DNA, 23 bp, Artificial Sequence
  Description of Artificial Sequence: Synthetic oligonucleotide
agaactcaagacttgacatctgg

SEQ ID NO: 3413 - DNA, 23 bp, Artificial Sequence
  Description of Artificial Sequence: Synthetic oligonucleotide
gaactcaagacttgacatctggg

SEQ ID NO: 3414 - DNA, 23 bp, Artificial Sequence
  Description of Artificial Sequence: Synthetic oligonucleotide
ccctgcaaatagaaaggcaaggg

SEQ ID NO: 3415 - DNA, 23 bp, Artificial Sequence
  Description of Artificial Sequence: Synthetic oligonucleotide
accctgcaaatagaaaggcaagg

SEQ ID NO: 3416 - DNA, 23 bp, Artificial Sequence
  Description of Artificial Sequence: Synthetic oligonucleotide
aagtgaccctgcaaatagaaagg

SEQ ID NO: 3417 - DNA, 23 bp, Artificial Sequence
  Description of Artificial Sequence: Synthetic oligonucleotide
tcccttgcctttctatttgcagg

SEQ ID NO: 3418 - DNA, 23 bp, Artificial Sequence
  Description of Artificial Sequence: Synthetic oligonucleotide
cccttgcctttctatttgcaggg

SEQ ID NO: 3419 - DNA, 23 bp, Artificial Sequence
  Description of Artificial Sequence: Synthetic oligonucleotide
ctgacctcttgactatacattgg

SEQ ID NO: 3420 - DNA, 23 bp, Artificial Sequence
  Description of Artificial Sequence: Synthetic oligonucleotide
cttgccaatgtatagtcaagagg

SEQ ID NO: 3421 - DNA, 23 bp, Artificial Sequence
  Description of Artificial Sequence: Synthetic oligonucleotide
atagtcaagaggtcagagtgagg

SEQ ID NO: 3422 - DNA, 23 bp, Artificial Sequence
  Description of Artificial Sequence: Synthetic oligonucleotide
tagtcaagaggtcagagtgaggg

SEQ ID NO: 3423 - DNA, 23 bp, Artificial Sequence
  Description of Artificial Sequence: Synthetic oligonucleotide
tacagctgagctgcagccccagg

SEQ ID NO: 3424 - DNA, 23 bp, Artificial Sequence
  Description of Artificial Sequence: Synthetic oligonucleotide
gctgagctgcagccccaggaagg

SEQ ID NO: 3425 - DNA, 23 bp, Artificial Sequence
  Description of Artificial Sequence: Synthetic oligonucleotide
cccccttctctgccttcctgggg

SEQ ID NO: 3426 - DNA, 23 bp, Artificial Sequence
  Description of Artificial Sequence: Synthetic oligonucleotide
gcccccttctctgccttcctggg

SEQ ID NO: 3427 - DNA, 23 bp, Artificial Sequence
  Description of Artificial Sequence: Synthetic oligonucleotide
ggcccccttctctgccttcctgg

SEQ ID NO: 3428 - DNA, 23 bp, Artificial Sequence
  Description of Artificial Sequence: Synthetic oligonucleotide
cagccccaggaaggcagagaagg

SEQ ID NO: 3429 - DNA, 23 bp, Artificial Sequence
  Description of Artificial Sequence: Synthetic oligonucleotide
agccccaggaaggcagagaaggg

SEQ ID NO: 3430 - DNA, 23 bp, Artificial Sequence
  Description of Artificial Sequence: Synthetic oligonucleotide
gccccaggaaggcagagaagggg

SEQ ID NO: 3431 - DNA, 23 bp, Artificial Sequence
  Description of Artificial Sequence: Synthetic oligonucleotide
ccccaggaaggcagagaaggggg

SEQ ID NO: 3432 - DNA, 23 bp, Artificial Sequence
  Description of Artificial Sequence: Synthetic oligonucleotide
gggcaggcacgcacacaacttgg

SEQ ID NO: 3433 - DNA, 23 bp, Artificial Sequence
  Description of Artificial Sequence: Synthetic oligonucleotide
ttgccctaagagggaagggcagg

SEQ ID NO: 3434 - DNA, 23 bp, Artificial Sequence
  Description of Artificial Sequence: Synthetic oligonucleotide
agttttgccctaagagggaaggg

SEQ ID NO: 3435 - DNA, 23 bp, Artificial Sequence
  Description of Artificial Sequence: Synthetic oligonucleotide
gagttttgccctaagagggaagg

SEQ ID NO: 3436 - DNA, 23 bp, Artificial Sequence
  Description of Artificial Sequence: Synthetic oligonucleotide
cgtgcctgcccttccctcttagg

SEQ ID NO: 3437 - DNA, 23 bp, Artificial Sequence
  Description of Artificial Sequence: Synthetic oligonucleotide
gtgcctgcccttccctcttaggg

SEQ ID NO: 3438 - DNA, 23 bp, Artificial Sequence
  Description of Artificial Sequence: Synthetic oligonucleotide
tttggagttttgccctaagaggg

SEQ ID NO: 3439 - DNA, 23 bp, Artificial Sequence
  Description of Artificial Sequence: Synthetic oligonucleotide
gtttggagttttgccctaagagg

SEQ ID NO: 3440 - DNA, 23 bp, Artificial Sequence
  Description of Artificial Sequence: Synthetic oligonucleotide
tccagataatcaagggtgtttgg

SEQ ID NO: 3441 - DNA, 23 bp, Artificial Sequence
  Description of Artificial Sequence: Synthetic oligonucleotide
aagaagatccagataatcaaggg

SEQ ID NO: 3442 - DNA, 23 bp, Artificial Sequence
  Description of Artificial Sequence: Synthetic oligonucleotide
aaagaagatccagataatcaagg

SEQ ID NO: 3443 - DNA, 23 bp, Artificial Sequence
  Description of Artificial Sequence: Synthetic oligonucleotide
tccaaacacccttgattatctgg

SEQ ID NO: 3444 - DNA, 23 bp, Artificial Sequence
  Description of Artificial Sequence: Synthetic oligonucleotide
ttaacatctggtatcttctatgg

SEQ ID NO: 3445 - DNA, 23 bp, Artificial Sequence
  Description of Artificial Sequence: Synthetic oligonucleotide
tgccaatattccttaacatctgg

SEQ ID NO: 3446 - DNA, 23 bp, Artificial Sequence
  Description of Artificial Sequence: Synthetic oligonucleotide
atagaagataccagatgttaagg

SEQ ID NO: 3447 - DNA, 23 bp, Artificial Sequence
  Description of Artificial Sequence: Synthetic oligonucleotide
taccagatgttaaggaatattgg

SEQ ID NO: 3448 - DNA, 23 bp, Artificial Sequence
  Description of Artificial Sequence: Synthetic oligonucleotide
ggaatattggcagcttcacttgg

SEQ ID NO: 3449 - DNA, 23 bp, Artificial Sequence
  Description of Artificial Sequence: Synthetic oligonucleotide
cctccttgagtttggaaacaggg

SEQ ID NO: 3450 - DNA, 23 bp, Artificial Sequence
  Description of Artificial Sequence: Synthetic oligonucleotide
ccctccttgagtttggaaacagg

SEQ ID NO: 3451 - DNA, 23 bp, Artificial Sequence
  Description of Artificial Sequence: Synthetic oligonucleotide
aatccctgtttccaaactcaagg

SEQ ID NO: 3452 - DNA, 23 bp, Artificial Sequence
  Description of Artificial Sequence: Synthetic oligonucleotide
agcccatccctccttgagtttgg

SEQ ID NO: 3453 - DNA, 23 bp, Artificial Sequence
  Description of Artificial Sequence: Synthetic oligonucleotide
ccctgtttccaaactcaaggagg

SEQ ID NO: 3454 - DNA, 23 bp, Artificial Sequence
  Description of Artificial Sequence: Synthetic oligonucleotide
cctgtttccaaactcaaggaggg

SEQ ID NO: 3455 - DNA, 23 bp, Artificial Sequence
  Description of Artificial Sequence: Synthetic oligonucleotide
tttccaaactcaaggagggatgg

SEQ ID NO: 3456 - DNA, 23 bp, Artificial Sequence
  Description of Artificial Sequence: Synthetic oligonucleotide
ttccaaactcaaggagggatggg

SEQ ID NO: 3457 - DNA, 23 bp, Artificial Sequence
  Description of Artificial Sequence: Synthetic oligonucleotide
ctcatcactctcttcattgcagg

SEQ ID NO: 3458 - DNA, 23 bp, Artificial Sequence
  Description of Artificial Sequence: Synthetic oligonucleotide
attgcaggagcacatctctctgg

SEQ ID NO: 3459 - DNA, 23 bp, Artificial Sequence
  Description of Artificial Sequence: Synthetic oligonucleotide
tacaagaaagggtgatggttagg

SEQ ID NO: 3460 - DNA, 23 bp, Artificial Sequence
  Description of Artificial Sequence: Synthetic oligonucleotide
gcttcccaggagcatgatttagg

SEQ ID NO: 3461 - DNA, 23 bp, Artificial Sequence
  Description of Artificial Sequence: Synthetic oligonucleotide
tgggtcctaaatcatgctcctgg

SEQ ID NO: 3462 - DNA, 23 bp, Artificial Sequence
  Description of Artificial Sequence: Synthetic oligonucleotide
gggtcctaaatcatgctcctggg

SEQ ID NO: 3463 - DNA, 23 bp, Artificial Sequence
  Description of Artificial Sequence: Synthetic oligonucleotide
cccacagtaaggagcttcccagg

SEQ ID NO: 3464 - DNA, 23 bp, Artificial Sequence
  Description of Artificial Sequence: Synthetic oligonucleotide
tcctgggaagctccttactgtgg

SEQ ID NO: 3465 - DNA, 23 bp, Artificial Sequence
  Description of Artificial Sequence: Synthetic oligonucleotide
cctgggaagctccttactgtggg

SEQ ID NO: 3466 - DNA, 23 bp, Artificial Sequence
  Description of Artificial Sequence: Synthetic oligonucleotide
ctaatacaagtcccacagtaagg

SEQ ID NO: 3467 - DNA, 23 bp, Artificial Sequence
  Description of Artificial Sequence: Synthetic oligonucleotide
atgcaaactcctgcttattgagg

SEQ ID NO: 3468 - DNA, 23 bp, Artificial Sequence
  Description of Artificial Sequence: Synthetic oligonucleotide
aaaaaatgtcctcaataagcagg

SEQ ID NO: 3469 - DNA, 23 bp, Artificial Sequence
  Description of Artificial Sequence: Synthetic oligonucleotide
gcaggagtttgcatgagaactgg

SEQ ID NO: 3470 - DNA, 23 bp, Artificial Sequence
  Description of Artificial Sequence: Synthetic oligonucleotide
atgagaactggttgctgacaagg

SEQ ID NO: 3471 - DNA, 23 bp, Artificial Sequence
  Description of Artificial Sequence: Synthetic oligonucleotide
gaactggttgctgacaaggaagg

SEQ ID NO: 3472 - DNA, 23 bp, Artificial Sequence
  Description of Artificial Sequence: Synthetic oligonucleotide
acaaggaaggaaataatttctgg

SEQ ID NO: 3473 - DNA, 23 bp, Artificial Sequence
  Description of Artificial Sequence: Synthetic oligonucleotide
acaaaatgagatcctgcagaagg

SEQ ID NO: 3474 - DNA, 23 bp, Artificial Sequence
  Description of Artificial Sequence: Synthetic oligonucleotide
agagattccaatccttctgcagg

SEQ ID NO: 3475 - DNA, 23 bp, Artificial Sequence
  Description of Artificial Sequence: Synthetic oligonucleotide
atgagatcctgcagaaggattgg

SEQ ID NO: 3476 - DNA, 23 bp, Artificial Sequence
  Description of Artificial Sequence: Synthetic oligonucleotide
aggattggaatctctttttctgg

SEQ ID NO: 3477 - DNA, 23 bp, Artificial Sequence
  Description of Artificial Sequence: Synthetic oligonucleotide
attggaatctctttttctggagg

SEQ ID NO: 3478 - DNA, 23 bp, Artificial Sequence
  Description of Artificial Sequence: Synthetic oligonucleotide
attgtgtggtttattctcaaagg

SEQ ID NO: 3479 - DNA, 23 bp, Artificial Sequence
  Description of Artificial Sequence: Synthetic oligonucleotide
atacaggttggataattgtgtgg

SEQ ID NO: 3480 - DNA, 23 bp, Artificial Sequence
  Description of Artificial Sequence: Synthetic oligonucleotide
tattccttcacaatacaggttgg

SEQ ID NO: 3481 - DNA, 23 bp, Artificial Sequence
  Description of Artificial Sequence: Synthetic oligonucleotide
gacttattccttcacaatacagg

SEQ ID NO: 3482 - DNA, 23 bp, Artificial Sequence
  Description of Artificial Sequence: Synthetic oligonucleotide
ttatccaacctgtattgtgaagg

SEQ ID NO: 3483 - DNA, 23 bp, Artificial Sequence
  Description of Artificial Sequence: Synthetic oligonucleotide
gttaattcctgaattcaagaagg

SEQ ID NO: 3484 - DNA, 23 bp, Artificial Sequence
  Description of Artificial Sequence: Synthetic oligonucleotide
aataagtccttcttgaattcagg

SEQ ID NO: 3485 - DNA, 23 bp, Artificial Sequence
  Description of Artificial Sequence: Synthetic oligonucleotide
tgaattcaggaattaacacctgg

SEQ ID NO: 3486 - DNA, 23 bp, Artificial Sequence
  Description of Artificial Sequence: Synthetic oligonucleotide
gaattcaggaattaacacctggg

SEQ ID NO: 3487 - DNA, 23 bp, Artificial Sequence
  Description of Artificial Sequence: Synthetic oligonucleotide
ttcaggaattaacacctgggagg

SEQ ID NO: 3488 - DNA, 23 bp, Artificial Sequence
  Description of Artificial Sequence: Synthetic oligonucleotide
aggaattaacacctgggaggagg

SEQ ID NO: 3489 - DNA, 23 bp, Artificial Sequence
  Description of Artificial Sequence: Synthetic oligonucleotide
tgaactccatccctcctcccagg

SEQ ID NO: 3490 - DNA, 23 bp, Artificial Sequence
  Description of Artificial Sequence: Synthetic oligonucleotide
ggaattaacacctgggaggaggg

SEQ ID NO: 3491 - DNA, 23 bp, Artificial Sequence
  Description of Artificial Sequence: Synthetic oligonucleotide
ttaacacctgggaggagggatgg

SEQ ID NO: 3492 - DNA, 23 bp, Artificial Sequence
  Description of Artificial Sequence: Synthetic oligonucleotide
gggctgtattttagtttaggggg

SEQ ID NO: 3493 - DNA, 23 bp, Artificial Sequence
  Description of Artificial Sequence: Synthetic oligonucleotide
agggctgtattttagtttagggg

SEQ ID NO: 3494 - DNA, 23 bp, Artificial Sequence
  Description of Artificial Sequence: Synthetic oligonucleotide
gagggctgtattttagtttaggg

SEQ ID NO: 3495 - DNA, 23 bp, Artificial Sequence
  Description of Artificial Sequence: Synthetic oligonucleotide
ggagggctgtattttagtttagg

SEQ ID NO: 3496 - DNA, 23 bp, Artificial Sequence
  Description of Artificial Sequence: Synthetic oligonucleotide
aactaaaatacagccctccttgg

SEQ ID NO: 3497 - DNA, 23 bp, Artificial Sequence
  Description of Artificial Sequence: Synthetic oligonucleotide
ggcaccttttggaccaaggaggg

SEQ ID NO: 3498 - DNA, 23 bp, Artificial Sequence
  Description of Artificial Sequence: Synthetic oligonucleotide
aggcaccttttggaccaaggagg

SEQ ID NO: 3499 - DNA, 23 bp, Artificial Sequence
  Description of Artificial Sequence: Synthetic oligonucleotide
agaaggcaccttttggaccaagg

SEQ ID NO: 3500 - DNA, 23 bp, Artificial Sequence
  Description of Artificial Sequence: Synthetic oligonucleotide
acagccctccttggtccaaaagg

SEQ ID NO: 3501 - DNA, 23 bp, Artificial Sequence
  Description of Artificial Sequence: Synthetic oligonucleotide
agaagagagaaggcaccttttgg

SEQ ID NO: 3502 - DNA, 23 bp, Artificial Sequence
  Description of Artificial Sequence: Synthetic oligonucleotide
aagatacagcagaagagagaagg

SEQ ID NO: 3503 - DNA, 23 bp, Artificial Sequence
  Description of Artificial Sequence: Synthetic oligonucleotide
tgatttccagggtaactgttggg

SEQ ID NO: 3504 - DNA, 23 bp, Artificial Sequence
  Description of Artificial Sequence: Synthetic oligonucleotide
ttgatttccagggtaactgttgg

SEQ ID NO: 3505 - DNA, 23 bp, Artificial Sequence
  Description of Artificial Sequence: Synthetic oligonucleotide
ttcaaacccaacagttaccctgg

SEQ ID NO: 3506 - DNA, 23 bp, Artificial Sequence
  Description of Artificial Sequence: Synthetic oligonucleotide
tacttcctttttgatttccaggg

SEQ ID NO: 3507 - DNA, 23 bp, Artificial Sequence
  Description of Artificial Sequence: Synthetic oligonucleotide
gtacttcctttttgatttccagg

SEQ ID NO: 3508 - DNA, 23 bp, Artificial Sequence
  Description of Artificial Sequence: Synthetic oligonucleotide
agttaccctggaaatcaaaaagg

SEQ ID NO: 3509 - DNA, 23 bp, Artificial Sequence
  Description of Artificial Sequence: Synthetic oligonucleotide
aactcaacatagctcttgcctgg

SEQ ID NO: 3510 - DNA, 23 bp, Artificial Sequence
  Description of Artificial Sequence: Synthetic oligonucleotide
actcaacatagctcttgcctggg

SEQ ID NO: 3511 - DNA, 23 bp, Artificial Sequence
  Description of Artificial Sequence: Synthetic oligonucleotide
aaatggtgctggttggtcccagg

SEQ ID NO: 3512 - DNA, 23 bp, Artificial Sequence
  Description of Artificial Sequence: Synthetic oligonucleotide
tttagccaaatggtgctggttgg

SEQ ID NO: 3513 - DNA, 23 bp, Artificial Sequence
  Description of Artificial Sequence: Synthetic oligonucleotide
catctttagccaaatggtgctgg

SEQ ID NO: 3514 - DNA, 23 bp, Artificial Sequence
  Description of Artificial Sequence: Synthetic oligonucleotide
tgggaccaaccagcaccatttgg

SEQ ID NO: 3515 - DNA, 23 bp, Artificial Sequence
  Description of Artificial Sequence: Synthetic oligonucleotide
gataaccatctttagccaaatgg

SEQ ID NO: 3516 - DNA, 23 bp, Artificial Sequence
  Description of Artificial Sequence: Synthetic oligonucleotide
cagcaccatttggctaaagatgg

SEQ ID NO: 3517 - DNA, 23 bp, Artificial Sequence
  Description of Artificial Sequence: Synthetic oligonucleotide
taaacaaagaaataaataaatgg

SEQ ID NO: 3518 - DNA, 23 bp, Artificial Sequence
  Description of Artificial Sequence: Synthetic oligonucleotide
aaacaaagaaataaataaatggg

SEQ ID NO: 3519 - DNA, 23 bp, Artificial Sequence
  Description of Artificial Sequence: Synthetic oligonucleotide
atttatttcaacattgtcaatgg

SEQ ID NO: 3520 - DNA, 23 bp, Artificial Sequence
  Description of Artificial Sequence: Synthetic oligonucleotide
gagaatatcagttacacatgagg

SEQ ID NO: 3521 - DNA, 23 bp, Artificial Sequence
  Description of Artificial Sequence: Synthetic oligonucleotide
tgtaactgatattctcattatgg

SEQ ID NO: 3522 - DNA, 23 bp, Artificial Sequence
  Description of Artificial Sequence: Synthetic oligonucleotide
gtaactgatattctcattatggg

SEQ ID NO: 3523 - DNA, 23 bp, Artificial Sequence
  Description of Artificial Sequence: Synthetic oligonucleotide
gccccaataaagtcacacagagg

SEQ ID NO: 3524 - DNA, 23 bp, Artificial Sequence
  Description of Artificial Sequence: Synthetic oligonucleotide
ggacctctgtgtgactttattgg

SEQ ID NO: 3525 - DNA, 23 bp, Artificial Sequence
  Description of Artificial Sequence: Synthetic oligonucleotide
gacctctgtgtgactttattggg

SEQ ID NO: 3526 - DNA, 23 bp, Artificial Sequence
  Description of Artificial Sequence: Synthetic oligonucleotide
acctctgtgtgactttattgggg

SEQ ID NO: 3527 - DNA, 23 bp, Artificial Sequence
  Description of Artificial Sequence: Synthetic oligonucleotide
taaggaaagaacggttagagagg

SEQ ID NO: 3528 - DNA, 23 bp, Artificial Sequence
  Description of Artificial Sequence: Synthetic oligonucleotide
ggtcttccttaaggaaagaacgg

SEQ ID NO: 3529 - DNA, 23 bp, Artificial Sequence
  Description of Artificial Sequence: Synthetic oligonucleotide
ctctaaccgttctttccttaagg

SEQ ID NO: 3530 - DNA, 23 bp, Artificial Sequence
  Description of Artificial Sequence: Synthetic oligonucleotide
acaataaatggtcttccttaagg

SEQ ID NO: 3531 - DNA, 23 bp, Artificial Sequence
  Description of Artificial Sequence: Synthetic oligonucleotide
ccaggaaataaaacaataaatgg

SEQ ID NO: 3532 - DNA, 23 bp, Artificial Sequence
  Description of Artificial Sequence: Synthetic oligonucleotide
ccatttattgttttatttcctgg

SEQ ID NO: 3533 - DNA, 23 bp, Artificial Sequence
  Description of Artificial Sequence: Synthetic oligonucleotide
taaaatgatgtattttctccagg

SEQ ID NO: 3534 - DNA, 23 bp, Artificial Sequence
  Description of Artificial Sequence: Synthetic oligonucleotide
tgggatgggttattaaggctggg

SEQ ID NO: 3535 - DNA, 23 bp, Artificial Sequence
  Description of Artificial Sequence: Synthetic oligonucleotide
ctgggatgggttattaaggctgg

SEQ ID NO: 3536 - DNA, 23 bp, Artificial Sequence
  Description of Artificial Sequence: Synthetic oligonucleotide
tacactgggatgggttattaagg

SEQ ID NO: 3537 - DNA, 23 bp, Artificial Sequence
  Description of Artificial Sequence: Synthetic oligonucleotide
gaaggagtatacactgggatggg

SEQ ID NO: 3538 - DNA, 23 bp, Artificial Sequence
  Description of Artificial Sequence: Synthetic oligonucleotide
tgaaggagtatacactgggatgg

SEQ ID NO: 3539 - DNA, 23 bp, Artificial Sequence
  Description of Artificial Sequence: Synthetic oligonucleotide
aagatgaaggagtatacactggg

SEQ ID NO: 3540 - DNA, 23 bp, Artificial Sequence
  Description of Artificial Sequence: Synthetic oligonucleotide
gaagatgaaggagtatacactgg

SEQ ID NO: 3541 - DNA, 23 bp, Artificial Sequence
  Description of Artificial Sequence: Synthetic oligonucleotide
gtcattatccatgaagatgaagg

SEQ ID NO: 3542 - DNA, 23 bp, Artificial Sequence
  Description of Artificial Sequence: Synthetic oligonucleotide
tgtatactccttcatcttcatgg

SEQ ID NO: 3543 - DNA, 23 bp, Artificial Sequence
  Description of Artificial Sequence: Synthetic oligonucleotide
tttgttcagagcatgtagcaggg

SEQ ID NO: 3544 - DNA, 23 bp, Artificial Sequence
  Description of Artificial Sequence: Synthetic oligonucleotide
atttgttcagagcatgtagcagg

SEQ ID NO: 3545 - DNA, 23 bp, Artificial Sequence
  Description of Artificial Sequence: Synthetic oligonucleotide
ctacatgctctgaacaaatcagg

SEQ ID NO: 3546 - DNA, 23 bp, Artificial Sequence
  Description of Artificial Sequence: Synthetic oligonucleotide
catgctctgaacaaatcaggagg

SEQ ID NO: 3547 - DNA, 23 bp, Artificial Sequence
  Description of Artificial Sequence: Synthetic oligonucleotide
acaaatcaggaggcccctcgtgg

SEQ ID NO: 3548 - DNA, 23 bp, Artificial Sequence
  Description of Artificial Sequence: Synthetic oligonucleotide
actggttatacttccacgagggg

SEQ ID NO: 3549 - DNA, 23 bp, Artificial Sequence
  Description of Artificial Sequence: Synthetic oligonucleotide
gactggttatacttccacgaggg

SEQ ID NO: 3550 - DNA, 23 bp, Artificial Sequence
  Description of Artificial Sequence: Synthetic oligonucleotide
ggactggttatacttccacgagg

SEQ ID NO: 3551 - DNA, 23 bp, Artificial Sequence
  Description of Artificial Sequence: Synthetic oligonucleotide
gggacagagaaagaaaggactgg

SEQ ID NO: 3552 - DNA, 23 bp, Artificial Sequence
  Description of Artificial Sequence: Synthetic oligonucleotide
gaagagggacagagaaagaaagg

SEQ ID NO: 3553 - DNA, 23 bp, Artificial Sequence
  Description of Artificial Sequence: Synthetic oligonucleotide
gcagaagctccacccggggatgg

SEQ ID NO: 3554 - DNA, 23 bp, Artificial Sequence
  Description of Artificial Sequence: Synthetic oligonucleotide
taattagttccatccccgggtgg

SEQ ID NO: 3555 - DNA, 23 bp, Artificial Sequence
  Description of Artificial Sequence: Synthetic oligonucleotide
ctgggcagaagctccacccgggg

SEQ ID NO: 3556 - DNA, 23 bp, Artificial Sequence
  Description of Artificial Sequence: Synthetic oligonucleotide
actgggcagaagctccacccggg

SEQ ID NO: 3557 - DNA, 23 bp, Artificial Sequence
  Description of Artificial Sequence: Synthetic oligonucleotide
cactgggcagaagctccacccgg

SEQ ID NO: 3558 - DNA, 23 bp, Artificial Sequence
  Description of Artificial Sequence: Synthetic oligonucleotide
cgggtggagcttctgcccagtgg

SEQ ID NO: 3559 - DNA, 23 bp, Artificial Sequence
  Description of Artificial Sequence: Synthetic oligonucleotide
cccactccagcatgaccactggg

SEQ ID NO: 3560 - DNA, 23 bp, Artificial Sequence
  Description of Artificial Sequence: Synthetic oligonucleotide
tcccactccagcatgaccactgg

SEQ ID NO: 3561 - DNA, 23 bp, Artificial Sequence
  Description of Artificial Sequence: Synthetic oligonucleotide
cttctgcccagtggtcatgctgg

SEQ ID NO: 3562 - DNA, 23 bp, Artificial Sequence
  Description of Artificial Sequence: Synthetic oligonucleotide
gcccagtggtcatgctggagtgg

SEQ ID NO: 3563 - DNA, 23 bp, Artificial Sequence
  Description of Artificial Sequence: Synthetic oligonucleotide
cccagtggtcatgctggagtggg

SEQ ID NO: 3564 - DNA, 23 bp, Artificial Sequence
  Description of Artificial Sequence: Synthetic oligonucleotide
ggtcatgctggagtgggatgtgg

SEQ ID NO: 3565 - DNA, 23 bp, Artificial Sequence
  Description of Artificial Sequence: Synthetic oligonucleotide
gtcatgctggagtgggatgtggg

SEQ ID NO: 3566 - DNA, 23 bp, Artificial Sequence
  Description of Artificial Sequence: Synthetic oligonucleotide
tcatgctggagtgggatgtgggg

SEQ ID NO: 3567 - DNA, 23 bp, Artificial Sequence
  Description of Artificial Sequence: Synthetic oligonucleotide
gaaagcttgacaaatagctgggg

SEQ ID NO: 3568 - DNA, 23 bp, Artificial Sequence
  Description of Artificial Sequence: Synthetic oligonucleotide
agaaagcttgacaaatagctggg

SEQ ID NO: 3569 - DNA, 23 bp, Artificial Sequence
  Description of Artificial Sequence: Synthetic oligonucleotide
aagaaagcttgacaaatagctgg

SEQ ID NO: 3570 - DNA, 23 bp, Artificial Sequence
  Description of Artificial Sequence: Synthetic oligonucleotide
tgtcaagctttcttctaccttgg

SEQ ID NO: 3571 - DNA, 23 bp, Artificial Sequence
  Description of Artificial Sequence: Synthetic oligonucleotide
gtcaagctttcttctaccttggg

SEQ ID NO: 3572 - DNA, 23 bp, Artificial Sequence
  Description of Artificial Sequence: Synthetic oligonucleotide
tcaagctttcttctaccttgggg

SEQ ID NO: 3573 - DNA, 23 bp, Artificial Sequence
  Description of Artificial Sequence: Synthetic oligonucleotide
tagtgttaattgaatccccaagg

SEQ ID NO: 3574 - DNA, 23 bp, Artificial Sequence
  Description of Artificial Sequence: Synthetic oligonucleotide
ttccccatcccaagtctggaagg

SEQ ID NO: 3575 - DNA, 23 bp, Artificial Sequence
  Description of Artificial Sequence: Synthetic oligonucleotide
ctgctgcgaccttccagacttgg

SEQ ID NO: 3576 - DNA, 23 bp, Artificial Sequence
  Description of Artificial Sequence: Synthetic oligonucleotide
tgctgcgaccttccagacttggg

SEQ ID NO: 3577 - DNA, 23 bp, Artificial Sequence
  Description of Artificial Sequence: Synthetic oligonucleotide
ccttttccccatcccaagtctgg

SEQ ID NO: 3578 - DNA, 23 bp, Artificial Sequence
  Description of Artificial Sequence: Synthetic oligonucleotide
gcgaccttccagacttgggatgg

SEQ ID NO: 3579 - DNA, 23 bp, Artificial Sequence
  Description of Artificial Sequence: Synthetic oligonucleotide
cgaccttccagacttgggatggg

SEQ ID NO: 3580 - DNA, 23 bp, Artificial Sequence
  Description of Artificial Sequence: Synthetic oligonucleotide
gaccttccagacttgggatgggg

SEQ ID NO: 3581 - DNA, 23 bp, Artificial Sequence
  Description of Artificial Sequence: Synthetic oligonucleotide
ccagacttgggatggggaaaagg

SEQ ID NO: 3582 - DNA, 23 bp, Artificial Sequence
  Description of Artificial Sequence: Synthetic oligonucleotide
cttgggatggggaaaaggcaagg

SEQ ID NO: 3583 - DNA, 23 bp, Artificial Sequence
  Description of Artificial Sequence: Synthetic oligonucleotide
ttgggatggggaaaaggcaaggg

SEQ ID NO: 3584 - DNA, 23 bp, Artificial Sequence
  Description of Artificial Sequence: Synthetic oligonucleotide
cttcccaatgtaagctttcaagg

SEQ ID NO: 3585 - DNA, 23 bp, Artificial Sequence
  Description of Artificial Sequence: Synthetic oligonucleotide
gtcgccttgaaagcttacattgg

SEQ ID NO: 3586 - DNA, 23 bp, Artificial Sequence
  Description of Artificial Sequence: Synthetic oligonucleotide
tcgccttgaaagcttacattggg

SEQ ID NO: 3587 - DNA, 23 bp, Artificial Sequence
  Description of Artificial Sequence: Synthetic oligonucleotide
gaaagcttacattgggaagaagg

SEQ ID NO: 3588 - DNA, 23 bp, Artificial Sequence
  Description of Artificial Sequence: Synthetic oligonucleotide
aaagcttacattgggaagaaggg

SEQ ID NO: 3589 - DNA, 23 bp, Artificial Sequence
  Description of Artificial Sequence: Synthetic oligonucleotide
gagtgtaatcttcacatgcatgg

SEQ ID NO: 3590 - DNA, 23 bp, Artificial Sequence
  Description of Artificial Sequence: Synthetic oligonucleotide
agtgtaatcttcacatgcatggg

SEQ ID NO: 3591 - DNA, 23 bp, Artificial Sequence
  Description of Artificial Sequence: Synthetic oligonucleotide
tcttcacatgcatgggaagcagg

SEQ ID NO: 3592 - DNA, 23 bp, Artificial Sequence
  Description of Artificial Sequence: Synthetic oligonucleotide
cttcacatgcatgggaagcaggg

SEQ ID NO: 3593 - DNA, 23 bp, Artificial Sequence
  Description of Artificial Sequence: Synthetic oligonucleotide
cacatgcatgggaagcagggagg

SEQ ID NO: 3594 - DNA, 23 bp, Artificial Sequence
  Description of Artificial Sequence: Synthetic oligonucleotide
acatgcatgggaagcagggaggg

SEQ ID NO: 3595 - DNA, 23 bp, Artificial Sequence
  Description of Artificial Sequence: Synthetic oligonucleotide
catgcatgggaagcagggagggg

SEQ ID NO: 3596 - DNA, 23 bp, Artificial Sequence
  Description of Artificial Sequence: Synthetic oligonucleotide
atgcatgggaagcagggaggggg

SEQ ID NO: 3597 - DNA, 23 bp, Artificial Sequence
  Description of Artificial Sequence: Synthetic oligonucleotide
tgcatgggaagcagggagggggg

SEQ ID NO: 3598 - DNA, 23 bp, Artificial Sequence
  Description of Artificial Sequence: Synthetic oligonucleotide
atttttatgactgaagtgcaagg

SEQ ID NO: 3599 - DNA, 23 bp, Artificial Sequence
  Description of Artificial Sequence: Synthetic oligonucleotide
cttggagctttacaatgagaggg

SEQ ID NO: 3600 - DNA, 23 bp, Artificial Sequence
  Description of Artificial Sequence: Synthetic oligonucleotide
acttggagctttacaatgagagg

SEQ ID NO: 3601 - DNA, 23 bp, Artificial Sequence
  Description of Artificial Sequence: Synthetic oligonucleotide
ctatgtgctcttggctcacttgg

SEQ ID NO: 3602 - DNA, 23 bp, Artificial Sequence
  Description of Artificial Sequence: Synthetic oligonucleotide
cactgtaaactatgtgctcttgg

SEQ ID NO: 3603 - DNA, 23 bp, Artificial Sequence
  Description of Artificial Sequence: Synthetic oligonucleotide
gatactgcgcagagagtgagagg

SEQ ID NO: 3604 - DNA, 23 bp, Artificial Sequence
  Description of Artificial Sequence: Synthetic oligonucleotide
gcaagaaaacaaactcacaaggg

SEQ ID NO: 3605 - DNA, 23 bp, Artificial Sequence
  Description of Artificial Sequence: Synthetic oligonucleotide
ggcaagaaaacaaactcacaagg

SEQ ID NO: 3606 - DNA, 23 bp, Artificial Sequence
  Description of Artificial Sequence: Synthetic oligonucleotide
tgtgagtttgttttcttgcccgg

SEQ ID NO: 3607 - DNA, 23 bp, Artificial Sequence
  Description of Artificial Sequence: Synthetic oligonucleotide
agtcagaaatggagatagccggg

SEQ ID NO: 3608 - DNA, 23 bp, Artificial Sequence
  Description of Artificial Sequence: Synthetic oligonucleotide
aagtcagaaatggagatagccgg

SEQ ID NO: 3609 - DNA, 23 bp, Artificial Sequence
  Description of Artificial Sequence: Synthetic oligonucleotide
gtgaatgagcaagtcagaaatgg

SEQ ID NO: 3610 - DNA, 23 bp, Artificial Sequence
  Description of Artificial Sequence: Synthetic oligonucleotide
tctgacttgctcattcaccttgg

SEQ ID NO: 3611 - DNA, 23 bp, Artificial Sequence
  Description of Artificial Sequence: Synthetic oligonucleotide
ctgacttgctcattcaccttggg

SEQ ID NO: 3612 - DNA, 23 bp, Artificial Sequence
  Description of Artificial Sequence: Synthetic oligonucleotide
tgacttgctcattcaccttgggg

SEQ ID NO: 3613 - DNA, 23 bp, Artificial Sequence
  Description of Artificial Sequence: Synthetic oligonucleotide
ttcaatatgacagcaccccaagg

SEQ ID NO: 3614 - DNA, 23 bp, Artificial Sequence
  Description of Artificial Sequence: Synthetic oligonucleotide
ggtggctgaagtcagtgacaggg

SEQ ID NO: 3615 - DNA, 23 bp, Artificial Sequence
  Description of Artificial Sequence: Synthetic oligonucleotide
aggtggctgaagtcagtgacagg

SEQ ID NO: 3616 - DNA, 23 bp, Artificial Sequence
  Description of Artificial Sequence: Synthetic oligonucleotide
tctccaagcccttgtgcaggtgg

SEQ ID NO: 3617 - DNA, 23 bp, Artificial Sequence
  Description of Artificial Sequence: Synthetic oligonucleotide
tgacttcagccacctgcacaagg

SEQ ID NO: 3618 - DNA, 23 bp, Artificial Sequence
  Description of Artificial Sequence: Synthetic oligonucleotide
gacttcagccacctgcacaaggg

SEQ ID NO: 3619 - DNA, 23 bp, Artificial Sequence
  Description of Artificial Sequence: Synthetic oligonucleotide
tggtctccaagcccttgtgcagg

SEQ ID NO: 3620 - DNA, 23 bp, Artificial Sequence
  Description of Artificial Sequence: Synthetic oligonucleotide
cagccacctgcacaagggcttgg

SEQ ID NO: 3621 - DNA, 23 bp, Artificial Sequence
  Description of Artificial Sequence: Synthetic oligonucleotide
tctgggagggcagaggggtgtgg

SEQ ID NO: 3622 - DNA, 23 bp, Artificial Sequence
  Description of Artificial Sequence: Synthetic oligonucleotide
atgattctgggagggcagagggg

SEQ ID NO: 3623 - DNA, 23 bp, Artificial Sequence
  Description of Artificial Sequence: Synthetic oligonucleotide
tatgattctgggagggcagaggg

SEQ ID NO: 3624 - DNA, 23 bp, Artificial Sequence
  Description of Artificial Sequence: Synthetic oligonucleotide
atatgattctgggagggcagagg

SEQ ID NO: 3625 - DNA, 23 bp, Artificial Sequence
  Description of Artificial Sequence: Synthetic oligonucleotide
ccagggatatgattctgggaggg

SEQ ID NO: 3626 - DNA, 23 bp, Artificial Sequence
  Description of Artificial Sequence: Synthetic oligonucleotide
tccagggatatgattctgggagg

SEQ ID NO: 3627 - DNA, 23 bp, Artificial Sequence
  Description of Artificial Sequence: Synthetic oligonucleotide
gcctccagggatatgattctggg

SEQ ID NO: 3628 - DNA, 23 bp, Artificial Sequence
  Description of Artificial Sequence: Synthetic oligonucleotide
agcctccagggatatgattctgg

SEQ ID NO: 3629 - DNA, 23 bp, Artificial Sequence
  Description of Artificial Sequence: Synthetic oligonucleotide
ccctcccagaatcatatccctgg

SEQ ID NO: 3630 - DNA, 23 bp, Artificial Sequence
  Description of Artificial Sequence: Synthetic oligonucleotide
tcccagaatcatatccctggagg

SEQ ID NO: 3631 - DNA, 23 bp, Artificial Sequence
  Description of Artificial Sequence: Synthetic oligonucleotide
agagactagctgagcctccaggg

SEQ ID NO: 3632 - DNA, 23 bp, Artificial Sequence
  Description of Artificial Sequence: Synthetic oligonucleotide
cagagactagctgagcctccagg

SEQ ID NO: 3633 - DNA, 23 bp, Artificial Sequence
  Description of Artificial Sequence: Synthetic oligonucleotide
ctggaggctcagctagtctctgg

SEQ ID NO: 3634 - DNA, 23 bp, Artificial Sequence
  Description of Artificial Sequence: Synthetic oligonucleotide
tggaggctcagctagtctctggg

SEQ ID NO: 3635 - DNA, 23 bp, Artificial Sequence
  Description of Artificial Sequence: Synthetic oligonucleotide
gaaaagaaagggcagaggtatgg

SEQ ID NO: 3636 - DNA, 23 bp, Artificial Sequence
  Description of Artificial Sequence: Synthetic oligonucleotide
ggagggaaaagaaagggcagagg

SEQ ID NO: 3637 - DNA, 23 bp, Artificial Sequence
  Description of Artificial Sequence: Synthetic oligonucleotide
gagaaaggagggaaaagaaaggg

SEQ ID NO: 3638 - DNA, 23 bp, Artificial Sequence
  Description of Artificial Sequence: Synthetic oligonucleotide
ggagaaaggagggaaaagaaagg

SEQ ID NO: 3639 - DNA, 23 bp, Artificial Sequence
  Description of Artificial Sequence: Synthetic oligonucleotide
agaggccacaggagaaaggaggg

SEQ ID NO: 3640 - DNA, 23 bp, Artificial Sequence
  Description of Artificial Sequence: Synthetic oligonucleotide
cagaggccacaggagaaaggagg

SEQ ID NO: 3641 - DNA, 23 bp, Artificial Sequence
  Description of Artificial Sequence: Synthetic oligonucleotide
cgtcagaggccacaggagaaagg

SEQ ID NO: 3642 - DNA, 23 bp, Artificial Sequence
  Description of Artificial Sequence: Synthetic oligonucleotide
cttttccctcctttctcctgtgg

SEQ ID NO: 3643 - DNA, 23 bp, Artificial Sequence
  Description of Artificial Sequence: Synthetic oligonucleotide
ggccagacgtcagaggccacagg

SEQ ID NO: 3644 - DNA, 23 bp, Artificial Sequence
  Description of Artificial Sequence: Synthetic oligonucleotide
gttaaatggccagacgtcagagg

SEQ ID NO: 3645 - DNA, 23 bp, Artificial Sequence
  Description of Artificial Sequence: Synthetic oligonucleotide
ctcctgtggcctctgacgtctgg

SEQ ID NO: 3646 - DNA, 23 bp, Artificial Sequence
  Description of Artificial Sequence: Synthetic oligonucleotide
aaatgctaagctctgttaaatgg

SEQ ID NO: 3647 - DNA, 23 bp, Artificial Sequence
  Description of Artificial Sequence: Synthetic oligonucleotide
acagagcttagcatttttgctgg

SEQ ID NO: 3648 - DNA, 23 bp, Artificial Sequence
  Description of Artificial Sequence: Synthetic oligonucleotide
cagagcttagcatttttgctggg

SEQ ID NO: 3649 - DNA, 23 bp, Artificial Sequence
  Description of Artificial Sequence: Synthetic oligonucleotide
agcttagcatttttgctgggtgg

SEQ ID NO: 3650 - DNA, 23 bp, Artificial Sequence
  Description of Artificial Sequence: Synthetic oligonucleotide
ttttgctgggtggagagagctgg

SEQ ID NO: 3651 - DNA, 23 bp, Artificial Sequence
  Description of Artificial Sequence: Synthetic oligonucleotide
gggtggagagagctggagcctgg

SEQ ID NO: 3652 - DNA, 23 bp, Artificial Sequence
  Description of Artificial Sequence: Synthetic oligonucleotide
cacaaagagggagtgattccagg

SEQ ID NO: 3653 - DNA, 23 bp, Artificial Sequence
  Description of Artificial Sequence: Synthetic oligonucleotide
gccctccgtatgcacaaagaggg

SEQ ID NO: 3654 - DNA, 23 bp, Artificial Sequence
  Description of Artificial Sequence: Synthetic oligonucleotide
tgccctccgtatgcacaaagagg

SEQ ID NO: 3655 - DNA, 23 bp, Artificial Sequence
  Description of Artificial Sequence: Synthetic oligonucleotide
tcactccctctttgtgcatacgg

SEQ ID NO: 3656 - DNA, 23 bp, Artificial Sequence
  Description of Artificial Sequence: Synthetic oligonucleotide
ctccctctttgtgcatacggagg

SEQ ID NO: 3657 - DNA, 23 bp, Artificial Sequence
  Description of Artificial Sequence: Synthetic oligonucleotide
tccctctttgtgcatacggaggg

SEQ ID NO: 3658 - DNA, 23 bp, Artificial Sequence
  Description of Artificial Sequence: Synthetic oligonucleotide
tacggagggcatgaaaaccaagg

SEQ ID NO: 3659 - DNA, 23 bp, Artificial Sequence
  Description of Artificial Sequence: Synthetic oligonucleotide
ccactggaatgcacacaccttgg

SEQ ID NO: 3660 - DNA, 23 bp, Artificial Sequence
  Description of Artificial Sequence: Synthetic oligonucleotide
ccaaggtgtgtgcattccagtgg

SEQ ID NO: 3661 - DNA, 23 bp, Artificial Sequence
  Description of Artificial Sequence: Synthetic oligonucleotide
gtgtgtgcattccagtggcctgg

SEQ ID NO: 3662 - DNA, 23 bp, Artificial Sequence
  Description of Artificial Sequence: Synthetic oligonucleotide
gatagtagagtccaggccactgg

SEQ ID NO: 3663 - DNA, 23 bp, Artificial Sequence
  Description of Artificial Sequence: Synthetic oligonucleotide
cactgaggatagtagagtccagg

SEQ ID NO: 3664 - DNA, 23 bp, Artificial Sequence
  Description of Artificial Sequence: Synthetic oligonucleotide
ctggactctactatcctcagtgg

SEQ ID NO: 3665 - DNA, 23 bp, Artificial Sequence
  Description of Artificial Sequence: Synthetic oligonucleotide
ccttaaatacctcaccactgagg

SEQ ID NO: 3666 - DNA, 23 bp, Artificial Sequence
  Description of Artificial Sequence: Synthetic oligonucleotide
ctctactatcctcagtggtgagg

SEQ ID NO: 3667 - DNA, 23 bp, Artificial Sequence
  Description of Artificial Sequence: Synthetic oligonucleotide
cctcagtggtgaggtatttaagg

SEQ ID NO: 3668 - DNA, 23 bp, Artificial Sequence
  Description of Artificial Sequence: Synthetic oligonucleotide
aaatacctcaccacgctgagagg

SEQ ID NO: 3669 - DNA, 23 bp, Artificial Sequence
  Description of Artificial Sequence: Synthetic oligonucleotide
aaggaaaatacctctcagcgtgg

SEQ ID NO: 3670 - DNA, 23 bp, Artificial Sequence
  Description of Artificial Sequence: Synthetic oligonucleotide
aaatacctctcagcgtggtgagg

SEQ ID NO: 3671 - DNA, 23 bp, Artificial Sequence
  Description of Artificial Sequence: Synthetic oligonucleotide
tcagcgtggtgaggtatttaagg

SEQ ID NO: 3672 - DNA, 23 bp, Artificial Sequence
  Description of Artificial Sequence: Synthetic oligonucleotide
taaggaaaatacctgttgacagg

SEQ ID NO: 3673 - DNA, 23 bp, Artificial Sequence
  Description of Artificial Sequence: Synthetic oligonucleotide
agaaaatgtcacctgtcaacagg

SEQ ID NO: 3674 - DNA, 23 bp, Artificial Sequence
  Description of Artificial Sequence: Synthetic oligonucleotide
atggagacgtgtacttaagttgg

SEQ ID NO: 3675 - DNA, 23 bp, Artificial Sequence
  Description of Artificial Sequence: Synthetic oligonucleotide
ggatcactactttagaaaaatgg

SEQ ID NO: 3676 - DNA, 23 bp, Artificial Sequence
  Description of Artificial Sequence: Synthetic oligonucleotide
ttctaaagtagtgatccctcagg

SEQ ID NO: 3677 - DNA, 23 bp, Artificial Sequence
  Description of Artificial Sequence: Synthetic oligonucleotide
tctaaagtagtgatccctcaggg

SEQ ID NO: 3678 - DNA, 23 bp, Artificial Sequence
  Description of Artificial Sequence: Synthetic oligonucleotide
gtttgctgctggggccctgaggg

SEQ ID NO: 3679 - DNA, 23 bp, Artificial Sequence
  Description of Artificial Sequence: Synthetic oligonucleotide
tgtttgctgctggggccctgagg

SEQ ID NO: 3680 - DNA, 23 bp, Artificial Sequence
  Description of Artificial Sequence: Synthetic oligonucleotide
gtgccaactgtttgctgctgggg

SEQ ID NO: 3681 - DNA, 23 bp, Artificial Sequence
  Description of Artificial Sequence: Synthetic oligonucleotide
tgtgccaactgtttgctgctggg

SEQ ID NO: 3682 - DNA, 23 bp, Artificial Sequence
  Description of Artificial Sequence: Synthetic oligonucleotide
atgtgccaactgtttgctgctgg

SEQ ID NO: 3683 - DNA, 23 bp, Artificial Sequence
  Description of Artificial Sequence: Synthetic oligonucleotide
gggccccagcagcaaacagttgg

SEQ ID NO: 3684 - DNA, 23 bp, Artificial Sequence
  Description of Artificial Sequence: Synthetic oligonucleotide
agcaaacagttggcacatcaagg

SEQ ID NO: 3685 - DNA, 23 bp, Artificial Sequence
  Description of Artificial Sequence: Synthetic oligonucleotide
cacatcaaggattgacttgaagg

SEQ ID NO: 3686 - DNA, 23 bp, Artificial Sequence
  Description of Artificial Sequence: Synthetic oligonucleotide
acatcaaggattgacttgaaggg

SEQ ID NO: 3687 - DNA, 23 bp, Artificial Sequence
  Description of Artificial Sequence: Synthetic oligonucleotide
caagactattagtgaaagagtgg

SEQ ID NO: 3688 - DNA, 23 bp, Artificial Sequence
  Description of Artificial Sequence: Synthetic oligonucleotide
aagactattagtgaaagagtggg

SEQ ID NO: 3689 - DNA, 23 bp, Artificial Sequence
  Description of Artificial Sequence: Synthetic oligonucleotide
actattagtgaaagagtgggcgg

SEQ ID NO: 3690 - DNA, 23 bp, Artificial Sequence
  Description of Artificial Sequence: Synthetic oligonucleotide
ctattagtgaaagagtgggcggg

SEQ ID NO: 3691 - DNA, 23 bp, Artificial Sequence
  Description of Artificial Sequence: Synthetic oligonucleotide
gaaagagtgggcgggactaaagg

SEQ ID NO: 3692 - DNA, 23 bp, Artificial Sequence
  Description of Artificial Sequence: Synthetic oligonucleotide
gggactaaaggaactagcaaagg

SEQ ID NO: 3693 - DNA, 23 bp, Artificial Sequence
  Description of Artificial Sequence: Synthetic oligonucleotide
aaaggaactagcaaaggatgagg

SEQ ID NO: 3694 - DNA, 23 bp, Artificial Sequence
  Description of Artificial Sequence: Synthetic oligonucleotide
agcaaaggatgaggccaaccagg

SEQ ID NO: 3695 - DNA, 23 bp, Artificial Sequence
  Description of Artificial Sequence: Synthetic oligonucleotide
gcaaaggatgaggccaaccaggg

SEQ ID NO: 3696 - DNA, 23 bp, Artificial Sequence
  Description of Artificial Sequence: Synthetic oligonucleotide
cagggttgctagtccctggttgg

SEQ ID NO: 3697 - DNA, 23 bp, Artificial Sequence
  Description of Artificial Sequence: Synthetic oligonucleotide
ttcccagggttgctagtccctgg

SEQ ID NO: 3698 - DNA, 23 bp, Artificial Sequence
  Description of Artificial Sequence: Synthetic oligonucleotide
caaccagggactagcaaccctgg

SEQ ID NO: 3699 - DNA, 23 bp, Artificial Sequence
  Description of Artificial Sequence: Synthetic oligonucleotide
aaccagggactagcaaccctggg

SEQ ID NO: 3700 - DNA, 23 bp, Artificial Sequence
  Description of Artificial Sequence: Synthetic oligonucleotide
ggggtagtaaaggcttcccaggg

SEQ ID NO: 3701 - DNA, 23 bp, Artificial Sequence
  Description of Artificial Sequence: Synthetic oligonucleotide
aggggtagtaaaggcttcccagg

SEQ ID NO: 3702 - DNA, 23 bp, Artificial Sequence
  Description of Artificial Sequence: Synthetic oligonucleotide
cccaggcctaggggtagtaaagg

SEQ ID NO: 3703 - DNA, 23 bp, Artificial Sequence
  Description of Artificial Sequence: Synthetic oligonucleotide
gggaagcctttactacccctagg

SEQ ID NO: 3704 - DNA, 23 bp, Artificial Sequence
  Description of Artificial Sequence: Synthetic oligonucleotide
tcccattcccccaggcctagggg

SEQ ID NO: 3705 - DNA, 23 bp, Artificial Sequence
  Description of Artificial Sequence: Synthetic oligonucleotide
gcctttactacccctaggcctgg

SEQ ID NO: 3706 - DNA, 23 bp, Artificial Sequence
  Description of Artificial Sequence: Synthetic oligonucleotide
ctcccattcccccaggcctaggg

SEQ ID NO: 3707 - DNA, 23 bp, Artificial Sequence
  Description of Artificial Sequence: Synthetic oligonucleotide
cctttactacccctaggcctggg

SEQ ID NO: 3708 - DNA, 23 bp, Artificial Sequence
  Description of Artificial Sequence: Synthetic oligonucleotide
cctcccattcccccaggcctagg

SEQ ID NO: 3709 - DNA, 23 bp, Artificial Sequence
  Description of Artificial Sequence: Synthetic oligonucleotide
ctttactacccctaggcctgggg

SEQ ID NO: 3710 - DNA, 23 bp, Artificial Sequence
  Description of Artificial Sequence: Synthetic oligonucleotide
tttactacccctaggcctggggg

SEQ ID NO: 3711 - DNA, 23 bp, Artificial Sequence
  Description of Artificial Sequence: Synthetic oligonucleotide
tctcatcctcccattcccccagg

SEQ ID NO: 3712 - DNA, 23 bp, Artificial Sequence
  Description of Artificial Sequence: Synthetic oligonucleotide
tacccctaggcctgggggaatgg

SEQ ID NO: 3713 - DNA, 23 bp, Artificial Sequence
  Description of Artificial Sequence: Synthetic oligonucleotide
acccctaggcctgggggaatggg

SEQ ID NO: 3714 - DNA, 23 bp, Artificial Sequence
  Description of Artificial Sequence: Synthetic oligonucleotide
cctaggcctgggggaatgggagg

SEQ ID NO: 3715 - DNA, 23 bp, Artificial Sequence
  Description of Artificial Sequence: Synthetic oligonucleotide
gggaatgggaggatgagagcagg

SEQ ID NO: 3716 - DNA, 23 bp, Artificial Sequence
  Description of Artificial Sequence: Synthetic oligonucleotide
ggaggatgagagcaggaaccagg

SEQ ID NO: 3717 - DNA, 23 bp, Artificial Sequence
  Description of Artificial Sequence: Synthetic oligonucleotide
gaggatgagagcaggaaccaggg

SEQ ID NO: 3718 - DNA, 23 bp, Artificial Sequence
  Description of Artificial Sequence: Synthetic oligonucleotide
gatgagagcaggaaccagggagg

SEQ ID NO: 3719 - DNA, 23 bp, Artificial Sequence
  Description of Artificial Sequence: Synthetic oligonucleotide
tccaaggctcatgacctccctgg

SEQ ID NO: 3720 - DNA, 23 bp, Artificial Sequence
  Description of Artificial Sequence: Synthetic oligonucleotide
accagggaggtcatgagccttgg

SEQ ID NO: 3721 - DNA, 23 bp, Artificial Sequence
  Description of Artificial Sequence: Synthetic oligonucleotide
gaggtcatgagccttggacaagg

SEQ ID NO: 3722 - DNA, 23 bp, Artificial Sequence
  Description of Artificial Sequence: Synthetic oligonucleotide
ctgttctgtgcccttgtccaagg

SEQ ID NO: 3723 - DNA, 23 bp, Artificial Sequence
  Description of Artificial Sequence: Synthetic oligonucleotide
aggtcatgagccttggacaaggg

SEQ ID NO: 3724 - DNA, 23 bp, Artificial Sequence
  Description of Artificial Sequence: Synthetic oligonucleotide
tggctggctgcacatggctctgg

SEQ ID NO: 3725 - DNA, 23 bp, Artificial Sequence
  Description of Artificial Sequence: Synthetic oligonucleotide
tgacagtggctggctgcacatgg

SEQ ID NO: 3726 - DNA, 23 bp, Artificial Sequence
  Description of Artificial Sequence: Synthetic oligonucleotide
tgcatggttctgacagtggctgg

SEQ ID NO: 3727 - DNA, 23 bp, Artificial Sequence
  Description of Artificial Sequence: Synthetic oligonucleotide
cccttgcatggttctgacagtgg

SEQ ID NO: 3728 - DNA, 23 bp, Artificial Sequence
  Description of Artificial Sequence: Synthetic oligonucleotide
gccactgtcagaaccatgcaagg

SEQ ID NO: 3729 - DNA, 23 bp, Artificial Sequence
  Description of Artificial Sequence: Synthetic oligonucleotide
ccactgtcagaaccatgcaaggg

SEQ ID NO: 3730 - DNA, 23 bp, Artificial Sequence
  Description of Artificial Sequence: Synthetic oligonucleotide
cactgtcagaaccatgcaagggg

SEQ ID NO: 3731 - DNA, 23 bp, Artificial Sequence
  Description of Artificial Sequence: Synthetic oligonucleotide
gctgagtggtcccccttgcatgg

SEQ ID NO: 3732 - DNA, 23 bp, Artificial Sequence
  Description of Artificial Sequence: Synthetic oligonucleotide
actgtcagaaccatgcaaggggg

SEQ ID NO: 3733 - DNA, 23 bp, Artificial Sequence
  Description of Artificial Sequence: Synthetic oligonucleotide
agggaggctggggcgctgagtgg

SEQ ID NO: 3734 - DNA, 23 bp, Artificial Sequence
  Description of Artificial Sequence: Synthetic oligonucleotide
actgtctgagagggaggctgggg

SEQ ID NO: 3735 - DNA, 23 bp, Artificial Sequence
  Description of Artificial Sequence: Synthetic oligonucleotide
aactgtctgagagggaggctggg

SEQ ID NO: 3736 - DNA, 23 bp, Artificial Sequence
  Description of Artificial Sequence: Synthetic oligonucleotide
caactgtctgagagggaggctgg

SEQ ID NO: 3737 - DNA, 23 bp, Artificial Sequence
  Description of Artificial Sequence: Synthetic oligonucleotide
atggcaactgtctgagagggagg

SEQ ID NO: 3738 - DNA, 23 bp, Artificial Sequence
  Description of Artificial Sequence: Synthetic oligonucleotide
cagatggcaactgtctgagaggg

SEQ ID NO: 3739 - DNA, 23 bp, Artificial Sequence
  Description of Artificial Sequence: Synthetic oligonucleotide
ccagatggcaactgtctgagagg

SEQ ID NO: 3740 - DNA, 23 bp, Artificial Sequence
  Description of Artificial Sequence: Synthetic oligonucleotide
cctctcagacagttgccatctgg

SEQ ID NO: 3741 - DNA, 23 bp, Artificial Sequence
  Description of Artificial Sequence: Synthetic oligonucleotide
ctctcagacagttgccatctggg

SEQ ID NO: 3742 - DNA, 23 bp, Artificial Sequence
  Description of Artificial Sequence: Synthetic oligonucleotide
cagccaacaagagacccagatgg

SEQ ID NO: 3743 - DNA, 23 bp, Artificial Sequence
  Description of Artificial Sequence: Synthetic oligonucleotide
ttgccatctgggtctcttgttgg

SEQ ID NO: 3744 - DNA, 23 bp, Artificial Sequence
  Description of Artificial Sequence: Synthetic oligonucleotide
ttgttggctgatgcgagagcagg

SEQ ID NO: 3745 - DNA, 23 bp, Artificial Sequence
  Description of Artificial Sequence: Synthetic oligonucleotide
ttggctgatgcgagagcaggagg

SEQ ID NO: 3746 - DNA, 23 bp, Artificial Sequence
  Description of Artificial Sequence: Synthetic oligonucleotide
tggctgatgcgagagcaggaggg

SEQ ID NO: 3747 - DNA, 23 bp, Artificial Sequence
  Description of Artificial Sequence: Synthetic oligonucleotide
gctctatgaactgcatcagtggg

SEQ ID NO: 3748 - DNA, 23 bp, Artificial Sequence
  Description of Artificial Sequence: Synthetic oligonucleotide
agctctatgaactgcatcagtgg

SEQ ID NO: 3749 - DNA, 23 bp, Artificial Sequence
  Description of Artificial Sequence: Synthetic oligonucleotide
gttcatagagctcagcctcctgg

SEQ ID NO: 3750 - DNA, 23 bp, Artificial Sequence
  Description of Artificial Sequence: Synthetic oligonucleotide
ttcatagagctcagcctcctggg

SEQ ID NO: 3751 - DNA, 23 bp, Artificial Sequence
  Description of Artificial Sequence: Synthetic oligonucleotide
tgcccggtttcctgcccaggagg

SEQ ID NO: 3752 - DNA, 23 bp, Artificial Sequence
  Description of Artificial Sequence: Synthetic oligonucleotide
tagagctcagcctcctgggcagg

SEQ ID NO: 3753 - DNA, 23 bp, Artificial Sequence
  Description of Artificial Sequence: Synthetic oligonucleotide
ctctgcccggtttcctgcccagg

SEQ ID NO: 3754 - DNA, 23 bp, Artificial Sequence
  Description of Artificial Sequence: Synthetic oligonucleotide
cagcctcctgggcaggaaaccgg

SEQ ID NO: 3755 - DNA, 23 bp, Artificial Sequence
  Description of Artificial Sequence: Synthetic oligonucleotide
agcctcctgggcaggaaaccggg

SEQ ID NO: 3756 - DNA, 23 bp, Artificial Sequence
  Description of Artificial Sequence: Synthetic oligonucleotide
cttttctactcctctctgcccgg

SEQ ID NO: 3757 - DNA, 23 bp, Artificial Sequence
  Description of Artificial Sequence: Synthetic oligonucleotide
gggcaggaaaccgggcagagagg

SEQ ID NO: 3758 - DNA, 23 bp, Artificial Sequence
  Description of Artificial Sequence: Synthetic oligonucleotide
agaggagtagaaaagaattaagg

SEQ ID NO: 3759 - DNA, 23 bp, Artificial Sequence
  Description of Artificial Sequence: Synthetic oligonucleotide
gaggagtagaaaagaattaaggg

SEQ ID NO: 3760 - DNA, 23 bp, Artificial Sequence
  Description of Artificial Sequence: Synthetic oligonucleotide
gagtagaaaagaattaagggtgg

SEQ ID NO: 3761 - DNA, 23 bp, Artificial Sequence
  Description of Artificial Sequence: Synthetic oligonucleotide
acgtgcctcagtgactgggctgg

SEQ ID NO: 3762 - DNA, 23 bp, Artificial Sequence
  Description of Artificial Sequence: Synthetic oligonucleotide
ggaaacgtgcctcagtgactggg

SEQ ID NO: 3763 - DNA, 23 bp, Artificial Sequence
  Description of Artificial Sequence: Synthetic oligonucleotide
gggaaacgtgcctcagtgactgg

SEQ ID NO: 3764 - DNA, 23 bp, Artificial Sequence
  Description of Artificial Sequence: Synthetic oligonucleotide
tgcgaccagcccagtcactgagg

SEQ ID NO: 3765 - DNA, 23 bp, Artificial Sequence
  Description of Artificial Sequence: Synthetic oligonucleotide
cactgaggcacgtttcccactgg

SEQ ID NO: 3766 - DNA, 23 bp, Artificial Sequence
  Description of Artificial Sequence: Synthetic oligonucleotide
tgtgctcataggtctccagtggg

SEQ ID NO: 3767 - DNA, 23 bp, Artificial Sequence
  Description of Artificial Sequence: Synthetic oligonucleotide
ctgtgctcataggtctccagtgg

SEQ ID NO: 3768 - DNA, 23 bp, Artificial Sequence
  Description of Artificial Sequence: Synthetic oligonucleotide
tttattatcactgtgctcatagg

SEQ ID NO: 3769 - DNA, 23 bp, Artificial Sequence
  Description of Artificial Sequence: Synthetic oligonucleotide
ggatagtcagtgcaggtaactgg

SEQ ID NO: 3770 - DNA, 23 bp, Artificial Sequence
  Description of Artificial Sequence: Synthetic oligonucleotide
tctggagggatagtcagtgcagg

SEQ ID NO: 3771 - DNA, 23 bp, Artificial Sequence
  Description of Artificial Sequence: Synthetic oligonucleotide
tgggaaagcttttgtctggaggg

SEQ ID NO: 3772 - DNA, 23 bp, Artificial Sequence
  Description of Artificial Sequence: Synthetic oligonucleotide
ttgggaaagcttttgtctggagg

SEQ ID NO: 3773 - DNA, 23 bp, Artificial Sequence
  Description of Artificial Sequence: Synthetic oligonucleotide
ttcttgggaaagcttttgtctgg

SEQ ID NO: 3774 - DNA, 23 bp, Artificial Sequence
  Description of Artificial Sequence: Synthetic oligonucleotide
agagccatgactaacttcttggg

SEQ ID NO: 3775 - DNA, 23 bp, Artificial Sequence
  Description of Artificial Sequence: Synthetic oligonucleotide
cagagccatgactaacttcttgg

SEQ ID NO: 3776 - DNA, 23 bp, Artificial Sequence
  Description of Artificial Sequence: Synthetic oligonucleotide
ctttcccaagaagttagtcatgg

SEQ ID NO: 3777 - DNA, 23 bp, Artificial Sequence
  Description of Artificial Sequence: Synthetic oligonucleotide
ggctctgagagatctagttgagg

SEQ ID NO: 3778 - DNA, 23 bp, Artificial Sequence
  Description of Artificial Sequence: Synthetic oligonucleotide
gagatctagttgaggatgtttgg

SEQ ID NO: 3779 - DNA, 23 bp, Artificial Sequence
  Description of Artificial Sequence: Synthetic oligonucleotide
tctagttgaggatgtttggcagg

SEQ ID NO: 3780 - DNA, 23 bp, Artificial Sequence
  Description of Artificial Sequence: Synthetic oligonucleotide
ctagttgaggatgtttggcaggg

SEQ ID NO: 3781 - DNA, 23 bp, Artificial Sequence
  Description of Artificial Sequence: Synthetic oligonucleotide
tagttgaggatgtttggcagggg

SEQ ID NO: 3782 - DNA, 23 bp, Artificial Sequence
  Description of Artificial Sequence: Synthetic oligonucleotide
atgtttggcaggggatctagtgg

SEQ ID NO: 3783 - DNA, 23 bp, Artificial Sequence
  Description of Artificial Sequence: Synthetic oligonucleotide
ggcaggggatctagtggttacgg

SEQ ID NO: 3784 - DNA, 23 bp, Artificial Sequence
  Description of Artificial Sequence: Synthetic oligonucleotide
gcaggggatctagtggttacggg

SEQ ID NO: 3785 - DNA, 23 bp, Artificial Sequence
  Description of Artificial Sequence: Synthetic oligonucleotide
ggggatctagtggttacgggtgg

SEQ ID NO: 3786 - DNA, 23 bp, Artificial Sequence
  Description of Artificial Sequence: Synthetic oligonucleotide
acgggtggctaagaaaaatgagg

SEQ ID NO: 3787 - DNA, 23 bp, Artificial Sequence
  Description of Artificial Sequence: Synthetic oligonucleotide
gtggctaagaaaaatgaggaagg

SEQ ID NO: 3788 - DNA, 23 bp, Artificial Sequence
  Description of Artificial Sequence: Synthetic oligonucleotide
gagtatcttgcagcctgtgttgg

SEQ ID NO: 3789 - DNA, 23 bp, Artificial Sequence
  Description of Artificial Sequence: Synthetic oligonucleotide
agtatcttgcagcctgtgttggg

SEQ ID NO: 3790 - DNA, 23 bp, Artificial Sequence
  Description of Artificial Sequence: Synthetic oligonucleotide
ctatttaatcctcccaacacagg

SEQ ID NO: 3791 - DNA, 23 bp, Artificial Sequence
  Description of Artificial Sequence: Synthetic oligonucleotide
atcttgcagcctgtgttgggagg

SEQ ID NO: 3792 - DNA, 23 bp, Artificial Sequence
  Description of Artificial Sequence: Synthetic oligonucleotide
ctgtgttgggaggattaaatagg

SEQ ID NO: 3793 - DNA, 23 bp, Artificial Sequence
  Description of Artificial Sequence: Synthetic oligonucleotide
ttaaataggatgccacacacagg

SEQ ID NO: 3794 - DNA, 23 bp, Artificial Sequence
  Description of Artificial Sequence: Synthetic oligonucleotide
taaataggatgccacacacaggg

SEQ ID NO: 3795 - DNA, 23 bp, Artificial Sequence
  Description of Artificial Sequence: Synthetic oligonucleotide
tgtctgcctggccctgtgtgtgg

SEQ ID NO: 3796 - DNA, 23 bp, Artificial Sequence
  Description of Artificial Sequence: Synthetic oligonucleotide
aggatgccacacacagggccagg

SEQ ID NO: 3797 - DNA, 23 bp, Artificial Sequence
  Description of Artificial Sequence: Synthetic oligonucleotide
tactgaccaggctgtctgcctgg

SEQ ID NO: 3798 - DNA, 23 bp, Artificial Sequence
  Description of Artificial Sequence: Synthetic oligonucleotide
acagggccaggcagacagcctgg

SEQ ID NO: 3799 - DNA, 23 bp, Artificial Sequence
  Description of Artificial Sequence: Synthetic oligonucleotide
cgtcatggctattactgaccagg

SEQ ID NO: 3800 - DNA, 23 bp, Artificial Sequence
  Description of Artificial Sequence: Synthetic oligonucleotide
gtcagtaatagccatgacgatgg

SEQ ID NO: 3801 - DNA, 23 bp, Artificial Sequence
  Description of Artificial Sequence: Synthetic oligonucleotide
tccccccgcccccatcgtcatgg

SEQ ID NO: 3802 - DNA, 23 bp, Artificial Sequence
  Description of Artificial Sequence: Synthetic oligonucleotide
tcagtaatagccatgacgatggg

SEQ ID NO: 3803 - DNA, 23 bp, Artificial Sequence
  Description of Artificial Sequence: Synthetic oligonucleotide
cagtaatagccatgacgatgggg

SEQ ID NO: 3804 - DNA, 23 bp, Artificial Sequence
  Description of Artificial Sequence: Synthetic oligonucleotide
agtaatagccatgacgatggggg

SEQ ID NO: 3805 - DNA, 23 bp, Artificial Sequence
  Description of Artificial Sequence: Synthetic oligonucleotide
aatagccatgacgatgggggcgg

SEQ ID NO: 3806 - DNA, 23 bp, Artificial Sequence
  Description of Artificial Sequence: Synthetic oligonucleotide
atagccatgacgatgggggcggg

SEQ ID NO: 3807 - DNA, 23 bp, Artificial Sequence
  Description of Artificial Sequence: Synthetic oligonucleotide
tagccatgacgatgggggcgggg

SEQ ID NO: 3808 - DNA, 23 bp, Artificial Sequence
  Description of Artificial Sequence: Synthetic oligonucleotide
agccatgacgatgggggcggggg

SEQ ID NO: 3809 - DNA, 23 bp, Artificial Sequence
  Description of Artificial Sequence: Synthetic oligonucleotide
gccatgacgatgggggcgggggg

SEQ ID NO: 3810 - DNA, 23 bp, Artificial Sequence
  Description of Artificial Sequence: Synthetic oligonucleotide
acgatgggggcggggggagcagg

SEQ ID NO: 3811 - DNA, 23 bp, Artificial Sequence
  Description of Artificial Sequence: Synthetic oligonucleotide
gggggcggggggagcaggaatgg

SEQ ID NO: 3812 - DNA, 23 bp, Artificial Sequence
  Description of Artificial Sequence: Synthetic oligonucleotide
ggggcggggggagcaggaatggg

SEQ ID NO: 3813 - DNA, 23 bp, Artificial Sequence
  Description of Artificial Sequence: Synthetic oligonucleotide
agagtggaagcatctctcacagg

SEQ ID NO: 3814 - DNA, 23 bp, Artificial Sequence
  Description of Artificial Sequence: Synthetic oligonucleotide
gtctcatctttctgtgagagtgg

SEQ ID NO: 3815 - DNA, 23 bp, Artificial Sequence
  Description of Artificial Sequence: Synthetic oligonucleotide
ctcacagaaagatgagaccaagg

SEQ ID NO: 3816 - DNA, 23 bp, Artificial Sequence
  Description of Artificial Sequence: Synthetic oligonucleotide
gaaagatgagaccaaggaaaagg

SEQ ID NO: 3817 - DNA, 23 bp, Artificial Sequence
  Description of Artificial Sequence: Synthetic oligonucleotide
ctcttcctcctccttttccttgg

SEQ ID NO: 3818 - DNA, 23 bp, Artificial Sequence
  Description of Artificial Sequence: Synthetic oligonucleotide
agatgagaccaaggaaaaggagg

SEQ ID NO: 3819 - DNA, 23 bp, Artificial Sequence
  Description of Artificial Sequence: Synthetic oligonucleotide
tgagaccaaggaaaaggaggagg

SEQ ID NO: 3820 - DNA, 23 bp, Artificial Sequence
  Description of Artificial Sequence: Synthetic oligonucleotide
caaggaaaaggaggaggaagagg

SEQ ID NO: 3821 - DNA, 23 bp, Artificial Sequence
  Description of Artificial Sequence: Synthetic oligonucleotide
gaaaaggaggaggaagaggaagg

SEQ ID NO: 3822 - DNA, 23 bp, Artificial Sequence
  Description of Artificial Sequence: Synthetic oligonucleotide
gtgggccccaaggtttgtcaagg

SEQ ID NO: 3823 - DNA, 23 bp, Artificial Sequence
  Description of Artificial Sequence: Synthetic oligonucleotide
ggaaggaccttgacaaaccttgg

SEQ ID NO: 3824 - DNA, 23 bp, Artificial Sequence
  Description of Artificial Sequence: Synthetic oligonucleotide
gaaggaccttgacaaaccttggg

SEQ ID NO: 3825 - DNA, 23 bp, Artificial Sequence
  Description of Artificial Sequence: Synthetic oligonucleotide
aaggaccttgacaaaccttgggg

SEQ ID NO: 3826 - DNA, 23 bp, Artificial Sequence
  Description of Artificial Sequence: Synthetic oligonucleotide
tgtagacaatgtgggccccaagg

SEQ ID NO: 3827 - DNA, 23 bp, Artificial Sequence
  Description of Artificial Sequence: Synthetic oligonucleotide
aagggaggtgtagacaatgtggg

SEQ ID NO: 3828 - DNA, 23 bp, Artificial Sequence
  Description of Artificial Sequence: Synthetic oligonucleotide
gaagggaggtgtagacaatgtgg

SEQ ID NO: 3829 - DNA, 23 bp, Artificial Sequence
  Description of Artificial Sequence: Synthetic oligonucleotide
ctgctctagagcaggaagggagg

SEQ ID NO: 3830 - DNA, 23 bp, Artificial Sequence
  Description of Artificial Sequence: Synthetic oligonucleotide
attctgctctagagcaggaaggg

SEQ ID NO: 3831 - DNA, 23 bp, Artificial Sequence
  Description of Artificial Sequence: Synthetic oligonucleotide
tattctgctctagagcaggaagg

SEQ ID NO: 3832 - DNA, 23 bp, Artificial Sequence
  Description of Artificial Sequence: Synthetic oligonucleotide
tttctattctgctctagagcagg

SEQ ID NO: 3833 - DNA, 23 bp, Artificial Sequence
  Description of Artificial Sequence: Synthetic oligonucleotide
tagagcagaatagaaagttcagg

SEQ ID NO: 3834 - DNA, 23 bp, Artificial Sequence
  Description of Artificial Sequence: Synthetic oligonucleotide
gaatagaaagttcaggttgcagg

SEQ ID NO: 3835 - DNA, 23 bp, Artificial Sequence
  Description of Artificial Sequence: Synthetic oligonucleotide
agcaataaagaaaattaaacagg

SEQ ID NO: 3836 - DNA, 23 bp, Artificial Sequence
  Description of Artificial Sequence: Synthetic oligonucleotide
tacgtcagcatcacagacacagg

SEQ ID NO: 3837 - DNA, 23 bp, Artificial Sequence
  Description of Artificial Sequence: Synthetic oligonucleotide
gatgctgacgtatgttcctaagg

SEQ ID NO: 3838 - DNA, 23 bp, Artificial Sequence
  Description of Artificial Sequence: Synthetic oligonucleotide
tgacgtatgttcctaaggagagg

SEQ ID NO: 3839 - DNA, 23 bp, Artificial Sequence
  Description of Artificial Sequence: Synthetic oligonucleotide
tgaacttctcccctctccttagg

SEQ ID NO: 3840 - DNA, 23 bp, Artificial Sequence
  Description of Artificial Sequence: Synthetic oligonucleotide
gacgtatgttcctaaggagaggg

SEQ ID NO: 3841 - DNA, 23 bp, Artificial Sequence
  Description of Artificial Sequence: Synthetic oligonucleotide
acgtatgttcctaaggagagggg

SEQ ID NO: 3842 - DNA, 23 bp, Artificial Sequence
  Description of Artificial Sequence: Synthetic oligonucleotide
cattcttgctggacagagagagg

SEQ ID NO: 3843 - DNA, 23 bp, Artificial Sequence
  Description of Artificial Sequence: Synthetic oligonucleotide
ggggaatattccattcttgctgg

SEQ ID NO: 3844 - DNA, 23 bp, Artificial Sequence
  Description of Artificial Sequence: Synthetic oligonucleotide
ctctctctgtccagcaagaatgg

SEQ ID NO: 3845 - DNA, 23 bp, Artificial Sequence
  Description of Artificial Sequence: Synthetic oligonucleotide
agaatggaatattccccaagtgg

SEQ ID NO: 3846 - DNA, 23 bp, Artificial Sequence
  Description of Artificial Sequence: Synthetic oligonucleotide
aagctggctcaggccacttgggg

SEQ ID NO: 3847 - DNA, 23 bp, Artificial Sequence
  Description of Artificial Sequence: Synthetic oligonucleotide
caagctggctcaggccacttggg

SEQ ID NO: 3848 - DNA, 23 bp, Artificial Sequence
  Description of Artificial Sequence: Synthetic oligonucleotide
ccaagctggctcaggccacttgg

SEQ ID NO: 3849 - DNA, 23 bp, Artificial Sequence
  Description of Artificial Sequence: Synthetic oligonucleotide
aaagaaagccaagctggctcagg

SEQ ID NO: 3850 - DNA, 23 bp, Artificial Sequence
  Description of Artificial Sequence: Synthetic oligonucleotide
ccaagtggcctgagccagcttgg

SEQ ID NO: 3851 - DNA, 23 bp, Artificial Sequence
  Description of Artificial Sequence: Synthetic oligonucleotide
aaacaaaaagaaagccaagctgg

SEQ ID NO: 3852 - DNA, 23 bp, Artificial Sequence
  Description of Artificial Sequence: Synthetic oligonucleotide
tctttttgttttcaattatgtgg

SEQ ID NO: 3853 - DNA, 23 bp, Artificial Sequence
  Description of Artificial Sequence: Synthetic oligonucleotide
ctttttgttttcaattatgtggg

SEQ ID NO: 3854 - DNA, 23 bp, Artificial Sequence
  Description of Artificial Sequence: Synthetic oligonucleotide
tttcaattatgtgggagttgagg

SEQ ID NO: 3855 - DNA, 23 bp, Artificial Sequence
  Description of Artificial Sequence: Synthetic oligonucleotide
caattatgtgggagttgaggagg

SEQ ID NO: 3856 - DNA, 23 bp, Artificial Sequence
  Description of Artificial Sequence: Synthetic oligonucleotide
aattatgtgggagttgaggaggg

SEQ ID NO: 3857 - DNA, 23 bp, Artificial Sequence
  Description of Artificial Sequence: Synthetic oligonucleotide
attatgtgggagttgaggagggg

SEQ ID NO: 3858 - DNA, 23 bp, Artificial Sequence
  Description of Artificial Sequence: Synthetic oligonucleotide
ttatgtgggagttgaggaggggg

SEQ ID NO: 3859 - DNA, 23 bp, Artificial Sequence
  Description of Artificial Sequence: Synthetic oligonucleotide
gtgggagttgaggagggggatgg

SEQ ID NO: 3860 - DNA, 23 bp, Artificial Sequence
  Description of Artificial Sequence: Synthetic oligonucleotide
tgggagttgaggagggggatggg

SEQ ID NO: 3861 - DNA, 23 bp, Artificial Sequence
  Description of Artificial Sequence: Synthetic oligonucleotide
gcctgggggagggtgtgtttggg

SEQ ID NO: 3862 - DNA, 23 bp, Artificial Sequence
  Description of Artificial Sequence: Synthetic oligonucleotide
ggcctgggggagggtgtgtttgg

SEQ ID NO: 3863 - DNA, 23 bp, Artificial Sequence
  Description of Artificial Sequence: Synthetic oligonucleotide
tcccaaacacaccctcccccagg

SEQ ID NO: 3864 - DNA, 23 bp, Artificial Sequence
  Description of Artificial Sequence: Synthetic oligonucleotide
ggtgcctcaggcctgggggaggg

SEQ ID NO: 3865 - DNA, 23 bp, Artificial Sequence
  Description of Artificial Sequence: Synthetic oligonucleotide
gggtgcctcaggcctgggggagg

SEQ ID NO: 3866 - DNA, 23 bp, Artificial Sequence
  Description of Artificial Sequence: Synthetic oligonucleotide
caggggtgcctcaggcctggggg

SEQ ID NO: 3867 - DNA, 23 bp, Artificial Sequence
  Description of Artificial Sequence: Synthetic oligonucleotide
ccaggggtgcctcaggcctgggg

SEQ ID NO: 3868 - DNA, 23 bp, Artificial Sequence
  Description of Artificial Sequence: Synthetic oligonucleotide
cccaggggtgcctcaggcctggg

SEQ ID NO: 3869 - DNA, 23 bp, Artificial Sequence
  Description of Artificial Sequence: Synthetic oligonucleotide
cacaccctcccccaggcctgagg

SEQ ID NO: 3870 - DNA, 23 bp, Artificial Sequence
  Description of Artificial Sequence: Synthetic oligonucleotide
ccccaggggtgcctcaggcctgg

SEQ ID NO: 3871 - DNA, 23 bp, Artificial Sequence
  Description of Artificial Sequence: Synthetic oligonucleotide
ctgtcccccaggggtgcctcagg

SEQ ID NO: 3872 - DNA, 23 bp, Artificial Sequence
  Description of Artificial Sequence: Synthetic oligonucleotide
ccccaggcctgaggcacccctgg

SEQ ID NO: 3873 - DNA, 23 bp, Artificial Sequence
  Description of Artificial Sequence: Synthetic oligonucleotide
cccaggcctgaggcacccctggg

SEQ ID NO: 3874 - DNA, 23 bp, Artificial Sequence
  Description of Artificial Sequence: Synthetic oligonucleotide
ccaggcctgaggcacccctgggg

SEQ ID NO: 3875 - DNA, 23 bp, Artificial Sequence
  Description of Artificial Sequence: Synthetic oligonucleotide
caggcctgaggcacccctggggg

SEQ ID NO: 3876 - DNA, 23 bp, Artificial Sequence
  Description of Artificial Sequence: Synthetic oligonucleotide
taacactctctgtcccccagggg

SEQ ID NO: 3877 - DNA, 23 bp, Artificial Sequence
  Description of Artificial Sequence: Synthetic oligonucleotide
ctaacactctctgtcccccaggg

SEQ ID NO: 3878 - DNA, 23 bp, Artificial Sequence
  Description of Artificial Sequence: Synthetic oligonucleotide
tctaacactctctgtcccccagg

SEQ ID NO: 3879 - DNA, 23 bp, Artificial Sequence
  Description of Artificial Sequence: Synthetic oligonucleotide
tgggggacagagagtgttagagg

SEQ ID NO: 3880 - DNA, 23 bp, Artificial Sequence
  Description of Artificial Sequence: Synthetic oligonucleotide
ggacagagagtgttagaggttgg

SEQ ID NO: 3881 - DNA, 23 bp, Artificial Sequence
  Description of Artificial Sequence: Synthetic oligonucleotide
agagtgttagaggttggtacagg

SEQ ID NO: 3882 - DNA, 23 bp, Artificial Sequence
  Description of Artificial Sequence: Synthetic oligonucleotide
caggtgttagagatattgaaagg

SEQ ID NO: 3883 - DNA, 23 bp, Artificial Sequence
  Description of Artificial Sequence: Synthetic oligonucleotide
caccagcccctggggtgcatggg

SEQ ID NO: 3884 - DNA, 23 bp, Artificial Sequence
  Description of Artificial Sequence: Synthetic oligonucleotide
acaccagcccctggggtgcatgg

SEQ ID NO: 3885 - DNA, 23 bp, Artificial Sequence
  Description of Artificial Sequence: Synthetic oligonucleotide
aaggacatcccatgcaccccagg

SEQ ID NO: 3886 - DNA, 23 bp, Artificial Sequence
  Description of Artificial Sequence: Synthetic oligonucleotide
aggacatcccatgcaccccaggg

SEQ ID NO: 3887 - DNA, 23 bp, Artificial Sequence
  Description of Artificial Sequence: Synthetic oligonucleotide
ggacatcccatgcaccccagggg

SEQ ID NO: 3888 - DNA, 23 bp, Artificial Sequence
  Description of Artificial Sequence: Synthetic oligonucleotide
cagagccacaccagcccctgggg

SEQ ID NO: 3889 - DNA, 23 bp, Artificial Sequence
  Description of Artificial Sequence: Synthetic oligonucleotide
atcccatgcaccccaggggctgg

SEQ ID NO: 3890 - DNA, 23 bp, Artificial Sequence
  Description of Artificial Sequence: Synthetic oligonucleotide
acagagccacaccagcccctggg

SEQ ID NO: 3891 - DNA, 23 bp, Artificial Sequence
  Description of Artificial Sequence: Synthetic oligonucleotide
tacagagccacaccagcccctgg

SEQ ID NO: 3892 - DNA, 23 bp, Artificial Sequence
  Description of Artificial Sequence: Synthetic oligonucleotide
atgcaccccaggggctggtgtgg

SEQ ID NO: 3893 - DNA, 23 bp, Artificial Sequence
  Description of Artificial Sequence: Synthetic oligonucleotide
tggtgtggctctgtacttccagg

SEQ ID NO: 3894 - DNA, 23 bp, Artificial Sequence
  Description of Artificial Sequence: Synthetic oligonucleotide
cccttccacaaaatattgcctgg

SEQ ID NO: 3895 - DNA, 23 bp, Artificial Sequence
  Description of Artificial Sequence: Synthetic oligonucleotide
tacttccaggcaatattttgtgg

SEQ ID NO: 3896 - DNA, 23 bp, Artificial Sequence
  Description of Artificial Sequence: Synthetic oligonucleotide
tccaggcaatattttgtggaagg

SEQ ID NO: 3897 - DNA, 23 bp, Artificial Sequence
  Description of Artificial Sequence: Synthetic oligonucleotide
ccaggcaatattttgtggaaggg

SEQ ID NO: 3898 - DNA, 23 bp, Artificial Sequence
  Description of Artificial Sequence: Synthetic oligonucleotide
caggcaatattttgtggaagggg

SEQ ID NO: 3899 - DNA, 23 bp, Artificial Sequence
  Description of Artificial Sequence: Synthetic oligonucleotide
tccacaacctggagctgacaagg

SEQ ID NO: 3900 - DNA, 23 bp, Artificial Sequence
  Description of Artificial Sequence: Synthetic oligonucleotide
aggggaaccttgtcagctccagg

SEQ ID NO: 3901 - DNA, 23 bp, Artificial Sequence
  Description of Artificial Sequence: Synthetic oligonucleotide
accttgtcagctccaggttgtgg

SEQ ID NO: 3902 - DNA, 23 bp, Artificial Sequence
  Description of Artificial Sequence: Synthetic oligonucleotide
attttcaaacatccacaacctgg

SEQ ID NO: 3903 - DNA, 23 bp, Artificial Sequence
  Description of Artificial Sequence: Synthetic oligonucleotide
gtggatgtttgaaaatcagttgg

SEQ ID NO: 3904 - DNA, 23 bp, Artificial Sequence
  Description of Artificial Sequence: Synthetic oligonucleotide
gaaaatcagttggtacccagtgg

SEQ ID NO: 3905 - DNA, 23 bp, Artificial Sequence
  Description of Artificial Sequence: Synthetic oligonucleotide
tgccagaggatggagccactggg

SEQ ID NO: 3906 - DNA, 23 bp, Artificial Sequence
  Description of Artificial Sequence: Synthetic oligonucleotide
ctgccagaggatggagccactgg

SEQ ID NO: 3907 - DNA, 23 bp, Artificial Sequence
  Description of Artificial Sequence: Synthetic oligonucleotide
tacccagtggctccatcctctgg

SEQ ID NO: 3908 - DNA, 23 bp, Artificial Sequence
  Description of Artificial Sequence: Synthetic oligonucleotide
tccacatgcctgccagaggatgg

SEQ ID NO: 3909 - DNA, 23 bp, Artificial Sequence
  Description of Artificial Sequence: Synthetic oligonucleotide
cagtggctccatcctctggcagg

SEQ ID NO: 3910 - DNA, 23 bp, Artificial Sequence
  Description of Artificial Sequence: Synthetic oligonucleotide
caaatccacatgcctgccagagg

SEQ ID NO: 3911 - DNA, 23 bp, Artificial Sequence
  Description of Artificial Sequence: Synthetic oligonucleotide
tccatcctctggcaggcatgtgg

SEQ ID NO: 3912 - DNA, 23 bp, Artificial Sequence
  Description of Artificial Sequence: Synthetic oligonucleotide
cttattttggagagttcacttgg

SEQ ID NO: 3913 - DNA, 23 bp, Artificial Sequence
  Description of Artificial Sequence: Synthetic oligonucleotide
gaggaagttttaacttattttgg

SEQ ID NO: 3914 - DNA, 23 bp, Artificial Sequence
  Description of Artificial Sequence: Synthetic oligonucleotide
catcttgaaactgagaagggagg

SEQ ID NO: 3915 - DNA, 23 bp, Artificial Sequence
  Description of Artificial Sequence: Synthetic oligonucleotide
cagcatcttgaaactgagaaggg

SEQ ID NO: 3916 - DNA, 23 bp, Artificial Sequence
  Description of Artificial Sequence: Synthetic oligonucleotide
ccagcatcttgaaactgagaagg

SEQ ID NO: 3917 - DNA, 23 bp, Artificial Sequence
  Description of Artificial Sequence: Synthetic oligonucleotide
ccttctcagtttcaagatgctgg

SEQ ID NO: 3918 - DNA, 23 bp, Artificial Sequence
  Description of Artificial Sequence: Synthetic oligonucleotide
aaatagctgttcataagccctgg

SEQ ID NO: 3919 - DNA, 23 bp, Artificial Sequence
  Description of Artificial Sequence: Synthetic oligonucleotide
aatagctgttcataagccctggg

SEQ ID NO: 3920 - DNA, 23 bp, Artificial Sequence
  Description of Artificial Sequence: Synthetic oligonucleotide
atagctgttcataagccctgggg

SEQ ID NO: 3921 - DNA, 23 bp, Artificial Sequence
  Description of Artificial Sequence: Synthetic oligonucleotide
caaagggctaaatttccccaggg

SEQ ID NO: 3922 - DNA, 23 bp, Artificial Sequence
  Description of Artificial Sequence: Synthetic oligonucleotide
ccaaagggctaaatttccccagg

SEQ ID NO: 3923 - DNA, 23 bp, Artificial Sequence
  Description of Artificial Sequence: Synthetic oligonucleotide
cctggggaaatttagccctttgg

SEQ ID NO: 3924 - DNA, 23 bp, Artificial Sequence
  Description of Artificial Sequence: Synthetic oligonucleotide
gggaaatttagccctttggctgg

SEQ ID NO: 3925 - DNA, 23 bp, Artificial Sequence
  Description of Artificial Sequence: Synthetic oligonucleotide
tactcccattaccagccaaaggg

SEQ ID NO: 3926 - DNA, 23 bp, Artificial Sequence
  Description of Artificial Sequence: Synthetic oligonucleotide
atactcccattaccagccaaagg

SEQ ID NO: 3927 - DNA, 23 bp, Artificial Sequence
  Description of Artificial Sequence: Synthetic oligonucleotide
tttagccctttggctggtaatgg

SEQ ID NO: 3928 - DNA, 23 bp, Artificial Sequence
  Description of Artificial Sequence: Synthetic oligonucleotide
ttagccctttggctggtaatggg

SEQ ID NO: 3929 - DNA, 23 bp, Artificial Sequence
  Description of Artificial Sequence: Synthetic oligonucleotide
ttccagctgccctctcatctcgg

SEQ ID NO: 3930 - DNA, 23 bp, Artificial Sequence
  Description of Artificial Sequence: Synthetic oligonucleotide
atgggagtatccgagatgagagg

SEQ ID NO: 3931 - DNA, 23 bp, Artificial Sequence
  Description of Artificial Sequence: Synthetic oligonucleotide
tgggagtatccgagatgagaggg

SEQ ID NO: 3932 - DNA, 23 bp, Artificial Sequence
  Description of Artificial Sequence: Synthetic oligonucleotide
atccgagatgagagggcagctgg

SEQ ID NO: 3933 - DNA, 23 bp, Artificial Sequence
  Description of Artificial Sequence: Synthetic oligonucleotide
agagggcagctggaaactttcgg

SEQ ID NO: 3934 - DNA, 23 bp, Artificial Sequence
  Description of Artificial Sequence: Synthetic oligonucleotide
tttcccaaattaagtgtgggagg

SEQ ID NO: 3935 - DNA, 23 bp, Artificial Sequence
  Description of Artificial Sequence: Synthetic oligonucleotide
gcatttcccaaattaagtgtggg

SEQ ID NO: 3936 - DNA, 23 bp, Artificial Sequence
  Description of Artificial Sequence: Synthetic oligonucleotide
ggcatttcccaaattaagtgtgg

SEQ ID NO: 3937 - DNA, 23 bp, Artificial Sequence
  Description of Artificial Sequence: Synthetic oligonucleotide
atgacctcccacacttaatttgg

SEQ ID NO: 3938 - DNA, 23 bp, Artificial Sequence
  Description of Artificial Sequence: Synthetic oligonucleotide
tgacctcccacacttaatttggg

SEQ ID NO: 3939 - DNA, 23 bp, Artificial Sequence
  Description of Artificial Sequence: Synthetic oligonucleotide
ggttgcccataaaggtgcagagg

SEQ ID NO: 3940 - DNA, 23 bp, Artificial Sequence
  Description of Artificial Sequence: Synthetic oligonucleotide
gaaatgcctctgcacctttatgg

SEQ ID NO: 3941 - DNA, 23 bp, Artificial Sequence
  Description of Artificial Sequence: Synthetic oligonucleotide
aaatgcctctgcacctttatggg

SEQ ID NO: 3942 - DNA, 23 bp, Artificial Sequence
  Description of Artificial Sequence: Synthetic oligonucleotide
aggcatctggttgcccataaagg

SEQ ID NO: 3943 - DNA, 23 bp, Artificial Sequence
  Description of Artificial Sequence: Synthetic oligonucleotide
cagcaactggggcaggcatctgg

SEQ ID NO: 3944 - DNA, 23 bp, Artificial Sequence
  Description of Artificial Sequence: Synthetic oligonucleotide
gtgtctccagcaactggggcagg

SEQ ID NO: 3945 - DNA, 23 bp, Artificial Sequence
  Description of Artificial Sequence: Synthetic oligonucleotide
atcagtgtctccagcaactgggg

SEQ ID NO: 3946 - DNA, 23 bp, Artificial Sequence
  Description of Artificial Sequence: Synthetic oligonucleotide
cagatgcctgccccagttgctgg

SEQ ID NO: 3947 - DNA, 23 bp, Artificial Sequence
  Description of Artificial Sequence: Synthetic oligonucleotide
catcagtgtctccagcaactggg

SEQ ID NO: 3948 - DNA, 23 bp, Artificial Sequence
  Description of Artificial Sequence: Synthetic oligonucleotide
acatcagtgtctccagcaactgg

SEQ ID NO: 3949 - DNA, 23 bp, Artificial Sequence
  Description of Artificial Sequence: Synthetic oligonucleotide
agttgctggagacactgatgtgg

SEQ ID NO: 3950 - DNA, 23 bp, Artificial Sequence
  Description of Artificial Sequence: Synthetic oligonucleotide
gttgctggagacactgatgtggg

SEQ ID NO: 3951 - DNA, 23 bp, Artificial Sequence
  Description of Artificial Sequence: Synthetic oligonucleotide
agacactgatgtgggctgaaagg

SEQ ID NO: 3952 - DNA, 23 bp, Artificial Sequence
  Description of Artificial Sequence: Synthetic oligonucleotide
aggaatgctgagacgtgacgagg

SEQ ID NO: 3953 - DNA, 23 bp, Artificial Sequence
  Description of Artificial Sequence: Synthetic oligonucleotide
cgtgacgaggagagatgctgcgg

SEQ ID NO: 3954 - DNA, 23 bp, Artificial Sequence
  Description of Artificial Sequence: Synthetic oligonucleotide
gacgaggagagatgctgcggagg

SEQ ID NO: 3955 - DNA, 23 bp, Artificial Sequence
  Description of Artificial Sequence: Synthetic oligonucleotide
acgaggagagatgctgcggaggg

SEQ ID NO: 3956 - DNA, 23 bp, Artificial Sequence
  Description of Artificial Sequence: Synthetic oligonucleotide
cgatgaggtcagggctgaggggg

SEQ ID NO: 3957 - DNA, 23 bp, Artificial Sequence
  Description of Artificial Sequence: Synthetic oligonucleotide
ccgatgaggtcagggctgagggg

SEQ ID NO: 3958 - DNA, 23 bp, Artificial Sequence
  Description of Artificial Sequence: Synthetic oligonucleotide
gccgatgaggtcagggctgaggg

SEQ ID NO: 3959 - DNA, 23 bp, Artificial Sequence
  Description of Artificial Sequence: Synthetic oligonucleotide
agccgatgaggtcagggctgagg

SEQ ID NO: 3960 - DNA, 23 bp, Artificial Sequence
  Description of Artificial Sequence: Synthetic oligonucleotide
ccatggagccgatgaggtcaggg

SEQ ID NO: 3961 - DNA, 23 bp, Artificial Sequence
  Description of Artificial Sequence: Synthetic oligonucleotide
gccatggagccgatgaggtcagg

SEQ ID NO: 3962 - DNA, 23 bp, Artificial Sequence
  Description of Artificial Sequence: Synthetic oligonucleotide
cccctcagccctgacctcatcgg

SEQ ID NO: 3963 - DNA, 23 bp, Artificial Sequence
  Description of Artificial Sequence: Synthetic oligonucleotide
gaggagccatggagccgatgagg

SEQ ID NO: 3964 - DNA, 23 bp, Artificial Sequence
  Description of Artificial Sequence: Synthetic oligonucleotide
ccctgacctcatcggctccatgg

SEQ ID NO: 3965 - DNA, 23 bp, Artificial Sequence
  Description of Artificial Sequence: Synthetic oligonucleotide
gctgtactgtggaggagccatgg

SEQ ID NO: 3966 - DNA, 23 bp, Artificial Sequence
  Description of Artificial Sequence: Synthetic oligonucleotide
agtagacagctgtactgtggagg

SEQ ID NO: 3967 - DNA, 23 bp, Artificial Sequence
  Description of Artificial Sequence: Synthetic oligonucleotide
aagagtagacagctgtactgtgg

SEQ ID NO: 3968 - DNA, 23 bp, Artificial Sequence
  Description of Artificial Sequence: Synthetic oligonucleotide
ctcttttaagttctcccttcagg

SEQ ID NO: 3969 - DNA, 23 bp, Artificial Sequence
  Description of Artificial Sequence: Synthetic oligonucleotide
tgagatggctatttcctgaaggg

SEQ ID NO: 3970 - DNA, 23 bp, Artificial Sequence
  Description of Artificial Sequence: Synthetic oligonucleotide
ttgagatggctatttcctgaagg

SEQ ID NO: 3971 - DNA, 23 bp, Artificial Sequence
  Description of Artificial Sequence: Synthetic oligonucleotide
aatgcacattctgtttgagatgg

SEQ ID NO: 3972 - DNA, 23 bp, Artificial Sequence
  Description of Artificial Sequence: Synthetic oligonucleotide
tcaaacagaatgtgcatttgagg

SEQ ID NO: 3973 - DNA, 23 bp, Artificial Sequence
  Description of Artificial Sequence: Synthetic oligonucleotide
caaacagaatgtgcatttgaggg

SEQ ID NO: 3974 - DNA, 23 bp, Artificial Sequence
  Description of Artificial Sequence: Synthetic oligonucleotide
actactgtgttataaccgtcagg

SEQ ID NO: 3975 - DNA, 23 bp, Artificial Sequence
  Description of Artificial Sequence: Synthetic oligonucleotide
atcatcagcatggctcctgacgg

SEQ ID NO: 3976 - DNA, 23 bp, Artificial Sequence
  Description of Artificial Sequence: Synthetic oligonucleotide
gggacgtttcatcatcagcatgg

SEQ ID NO: 3977 - DNA, 23 bp, Artificial Sequence
  Description of Artificial Sequence: Synthetic oligonucleotide
tgatgaaacgtcccagatgccgg

SEQ ID NO: 3978 - DNA, 23 bp, Artificial Sequence
  Description of Artificial Sequence: Synthetic oligonucleotide
cctttccagcaccggcatctggg

SEQ ID NO: 3979 - DNA, 23 bp, Artificial Sequence
  Description of Artificial Sequence: Synthetic oligonucleotide
acctttccagcaccggcatctgg

SEQ ID NO: 3980 - DNA, 23 bp, Artificial Sequence
  Description of Artificial Sequence: Synthetic oligonucleotide
aacgtcccagatgccggtgctgg

SEQ ID NO: 3981 - DNA, 23 bp, Artificial Sequence
  Description of Artificial Sequence: Synthetic oligonucleotide
gccagggacctttccagcaccgg

SEQ ID NO: 3982 - DNA, 23 bp, Artificial Sequence
  Description of Artificial Sequence: Synthetic oligonucleotide
cccagatgccggtgctggaaagg

SEQ ID NO: 3983 - DNA, 23 bp, Artificial Sequence
  Description of Artificial Sequence: Synthetic oligonucleotide
gccggtgctggaaaggtccctgg

SEQ ID NO: 3984 - DNA, 23 bp, Artificial Sequence
  Description of Artificial Sequence: Synthetic oligonucleotide
aatatttgcttggaaagccaggg

SEQ ID NO: 3985 - DNA, 23 bp, Artificial Sequence
  Description of Artificial Sequence: Synthetic oligonucleotide
aaatatttgcttggaaagccagg

SEQ ID NO: 3986 - DNA, 23 bp, Artificial Sequence
  Description of Artificial Sequence: Synthetic oligonucleotide
ccatgagataaatatttgcttgg

SEQ ID NO: 3987 - DNA, 23 bp, Artificial Sequence
  Description of Artificial Sequence: Synthetic oligonucleotide
ccaagcaaatatttatctcatgg

SEQ ID NO: 3988 - DNA, 23 bp, Artificial Sequence
  Description of Artificial Sequence: Synthetic oligonucleotide
aacatgagtcatactcacagagg

SEQ ID NO: 3989 - DNA, 23 bp, Artificial Sequence
  Description of Artificial Sequence: Synthetic oligonucleotide
gtcatactcacagaggagtatgg

SEQ ID NO: 3990 - DNA, 23 bp, Artificial Sequence
  Description of Artificial Sequence: Synthetic oligonucleotide
gggctccctggctgctgagaagg

SEQ ID NO: 3991 - DNA, 23 bp, Artificial Sequence
  Description of Artificial Sequence: Synthetic oligonucleotide
ttaactccttctcagcagccagg

SEQ ID NO: 3992 - DNA, 23 bp, Artificial Sequence
  Description of Artificial Sequence: Synthetic oligonucleotide
taactccttctcagcagccaggg

SEQ ID NO: 3993 - DNA, 23 bp, Artificial Sequence
  Description of Artificial Sequence: Synthetic oligonucleotide
gtctgggatgctgggctccctgg

SEQ ID NO: 3994 - DNA, 23 bp, Artificial Sequence
  Description of Artificial Sequence: Synthetic oligonucleotide
aatatgctgtctgggatgctggg

SEQ ID NO: 3995 - DNA, 23 bp, Artificial Sequence
  Description of Artificial Sequence: Synthetic oligonucleotide
aaatatgctgtctgggatgctgg

SEQ ID NO: 3996 - DNA, 23 bp, Artificial Sequence
  Description of Artificial Sequence: Synthetic oligonucleotide
ctgggttaaatatgctgtctggg

SEQ ID NO: 3997 - DNA, 23 bp, Artificial Sequence
  Description of Artificial Sequence: Synthetic oligonucleotide
tctgggttaaatatgctgtctgg

SEQ ID NO: 3998 - DNA, 23 bp, Artificial Sequence
  Description of Artificial Sequence: Synthetic oligonucleotide
agacagcatatttaacccagagg

SEQ ID NO: 3999 - DNA, 23 bp, Artificial Sequence
  Description of Artificial Sequence: Synthetic oligonucleotide
ccagcagtcagttggcctctggg

SEQ ID NO: 4000 - DNA, 23 bp, Artificial Sequence
  Description of Artificial Sequence: Synthetic oligonucleotide
cccagcagtcagttggcctctgg

SEQ ID NO: 4001 - DNA, 23 bp, Artificial Sequence
  Description of Artificial Sequence: Synthetic oligonucleotide
aatctgccccagcagtcagttgg

SEQ ID NO: 4002 - DNA, 23 bp, Artificial Sequence
  Description of Artificial Sequence: Synthetic oligonucleotide
cccagaggccaactgactgctgg

SEQ ID NO: 4003 - DNA, 23 bp, Artificial Sequence
  Description of Artificial Sequence: Synthetic oligonucleotide
ccagaggccaactgactgctggg

SEQ ID NO: 4004 - DNA, 23 bp, Artificial Sequence
  Description of Artificial Sequence: Synthetic oligonucleotide
cagaggccaactgactgctgggg

SEQ ID NO: 4005 - DNA, 23 bp, Artificial Sequence
  Description of Artificial Sequence: Synthetic oligonucleotide
tgactgctggggcagatttgtgg

SEQ ID NO: 4006 - DNA, 23 bp, Artificial Sequence
  Description of Artificial Sequence: Synthetic oligonucleotide
acaatctgtctaatggtcagagg

SEQ ID NO: 4007 - DNA, 23 bp, Artificial Sequence
  Description of Artificial Sequence: Synthetic oligonucleotide
gtgacccacaatctgtctaatgg

SEQ ID NO: 4008 - DNA, 23 bp, Artificial Sequence
  Description of Artificial Sequence: Synthetic oligonucleotide
tctgaccattagacagattgtgg

SEQ ID NO: 4009 - DNA, 23 bp, Artificial Sequence
  Description of Artificial Sequence: Synthetic oligonucleotide
ctgaccattagacagattgtggg

SEQ ID NO: 4010 - DNA, 23 bp, Artificial Sequence
  Description of Artificial Sequence: Synthetic oligonucleotide
tcacaacgttgagtatacagtgg

SEQ ID NO: 4011 - DNA, 23 bp, Artificial Sequence
  Description of Artificial Sequence: Synthetic oligonucleotide
cacaacgttgagtatacagtggg

SEQ ID NO: 4012 - DNA, 23 bp, Artificial Sequence
  Description of Artificial Sequence: Synthetic oligonucleotide
cttaataagtgcttattccctgg

SEQ ID NO: 4013 - DNA, 23 bp, Artificial Sequence
  Description of Artificial Sequence: Synthetic oligonucleotide
ttaataagtgcttattccctggg

SEQ ID NO: 4014 - DNA, 23 bp, Artificial Sequence
  Description of Artificial Sequence: Synthetic oligonucleotide
taagtgcttattccctgggcagg

SEQ ID NO: 4015 - DNA, 23 bp, Artificial Sequence
  Description of Artificial Sequence: Synthetic oligonucleotide
aagtgcttattccctgggcaggg

SEQ ID NO: 4016 - DNA, 23 bp, Artificial Sequence
  Description of Artificial Sequence: Synthetic oligonucleotide
aatgaagaactccctgcccaggg

SEQ ID NO: 4017 - DNA, 23 bp, Artificial Sequence
  Description of Artificial Sequence: Synthetic oligonucleotide
aaatgaagaactccctgcccagg

SEQ ID NO: 4018 - DNA, 23 bp, Artificial Sequence
  Description of Artificial Sequence: Synthetic oligonucleotide
ggcagggagttcttcatttcagg

SEQ ID NO: 4019 - DNA, 23 bp, Artificial Sequence
  Description of Artificial Sequence: Synthetic oligonucleotide
gcagggagttcttcatttcaggg

SEQ ID NO: 4020 - DNA, 23 bp, Artificial Sequence
  Description of Artificial Sequence: Synthetic oligonucleotide
cagggagttcttcatttcagggg

SEQ ID NO: 4021 - DNA, 23 bp, Artificial Sequence
  Description of Artificial Sequence: Synthetic oligonucleotide
cccagaggagaagatgtaagtgg

SEQ ID NO: 4022 - DNA, 23 bp, Artificial Sequence
  Description of Artificial Sequence: Synthetic oligonucleotide
accacttacatcttctcctctgg

SEQ ID NO: 4023 - DNA, 23 bp, Artificial Sequence
  Description of Artificial Sequence: Synthetic oligonucleotide
ccacttacatcttctcctctggg

SEQ ID NO: 4024 - DNA, 23 bp, Artificial Sequence
  Description of Artificial Sequence: Synthetic oligonucleotide
cctggtcaaggagggcccagagg

SEQ ID NO: 4025 - DNA, 23 bp, Artificial Sequence
  Description of Artificial Sequence: Synthetic oligonucleotide
gtaattagcctggtcaaggaggg

SEQ ID NO: 4026 - DNA, 23 bp, Artificial Sequence
  Description of Artificial Sequence: Synthetic oligonucleotide
ggtaattagcctggtcaaggagg

SEQ ID NO: 4027 - DNA, 23 bp, Artificial Sequence
  Description of Artificial Sequence: Synthetic oligonucleotide
cctctgggccctccttgaccagg

SEQ ID NO: 4028 - DNA, 23 bp, Artificial Sequence
  Description of Artificial Sequence: Synthetic oligonucleotide
aatggtaattagcctggtcaagg

SEQ ID NO: 4029 - DNA, 23 bp, Artificial Sequence
  Description of Artificial Sequence: Synthetic oligonucleotide
cccaagaatggtaattagcctgg

SEQ ID NO: 4030 - DNA, 23 bp, Artificial Sequence
  Description of Artificial Sequence: Synthetic oligonucleotide
accaggctaattaccattcttgg

SEQ ID NO: 4031 - DNA, 23 bp, Artificial Sequence
  Description of Artificial Sequence: Synthetic oligonucleotide
ccaggctaattaccattcttggg

SEQ ID NO: 4032 - DNA, 23 bp, Artificial Sequence
  Description of Artificial Sequence: Synthetic oligonucleotide
gatagagttaatcccaagaatgg

SEQ ID NO: 4033 - DNA, 23 bp, Artificial Sequence
  Description of Artificial Sequence: Synthetic oligonucleotide
ttagccagcctttgatttgcagg

SEQ ID NO: 4034 - DNA, 23 bp, Artificial Sequence
  Description of Artificial Sequence: Synthetic oligonucleotide
gtaagtgtcctgcaaatcaaagg

SEQ ID NO: 4035 - DNA, 23 bp, Artificial Sequence
  Description of Artificial Sequence: Synthetic oligonucleotide
gtgtcctgcaaatcaaaggctgg

SEQ ID NO: 4036 - DNA, 23 bp, Artificial Sequence
  Description of Artificial Sequence: Synthetic oligonucleotide
aaggctggctaaatttccccagg

SEQ ID NO: 4037 - DNA, 23 bp, Artificial Sequence
  Description of Artificial Sequence: Synthetic oligonucleotide
aggctggctaaatttccccaggg

SEQ ID NO: 4038 - DNA, 23 bp, Artificial Sequence
  Description of Artificial Sequence: Synthetic oligonucleotide
tggctaaatttccccagggcagg

SEQ ID NO: 4039 - DNA, 23 bp, Artificial Sequence
  Description of Artificial Sequence: Synthetic oligonucleotide
tgtcctggagccctgccctgggg

SEQ ID NO: 4040 - DNA, 23 bp, Artificial Sequence
  Description of Artificial Sequence: Synthetic oligonucleotide
ggctaaatttccccagggcaggg

SEQ ID NO: 4041 - DNA, 23 bp, Artificial Sequence
  Description of Artificial Sequence: Synthetic oligonucleotide
atgtcctggagccctgccctggg

SEQ ID NO: 4042 - DNA, 23 bp, Artificial Sequence
  Description of Artificial Sequence: Synthetic oligonucleotide
tatgtcctggagccctgccctgg

SEQ ID NO: 4043 - DNA, 23 bp, Artificial Sequence
  Description of Artificial Sequence: Synthetic oligonucleotide
tttccccagggcagggctccagg

SEQ ID NO: 4044 - DNA, 23 bp, Artificial Sequence
  Description of Artificial Sequence: Synthetic oligonucleotide
cctgggggtgagatatgtcctgg

SEQ ID NO: 4045 - DNA, 23 bp, Artificial Sequence
  Description of Artificial Sequence: Synthetic oligonucleotide
ccaggacatatctcacccccagg

SEQ ID NO: 4046 - DNA, 23 bp, Artificial Sequence
  Description of Artificial Sequence: Synthetic oligonucleotide
gacatatctcacccccaggatgg

SEQ ID NO: 4047 - DNA, 23 bp, Artificial Sequence
  Description of Artificial Sequence: Synthetic oligonucleotide
tgtgtataattccatcctggggg

SEQ ID NO: 4048 - DNA, 23 bp, Artificial Sequence
  Description of Artificial Sequence: Synthetic oligonucleotide
gtgtgtataattccatcctgggg

SEQ ID NO: 4049 - DNA, 23 bp, Artificial Sequence
  Description of Artificial Sequence: Synthetic oligonucleotide
tgtgtgtataattccatcctggg

SEQ ID NO: 4050 - DNA, 23 bp, Artificial Sequence
  Description of Artificial Sequence: Synthetic oligonucleotide
gtgtgtgtataattccatcctgg

SEQ ID NO: 4051 - DNA, 23 bp, Artificial Sequence
  Description of Artificial Sequence: Synthetic oligonucleotide
agattcgggctgcaacttgaagg

SEQ ID NO: 4052 - DNA, 23 bp, Artificial Sequence
  Description of Artificial Sequence: Synthetic oligonucleotide
cgaattacactcagagattcggg

SEQ ID NO: 4053 - DNA, 23 bp, Artificial Sequence
  Description of Artificial Sequence: Synthetic oligonucleotide
acgaattacactcagagattcgg

SEQ ID NO: 4054 - DNA, 23 bp, Artificial Sequence
  Description of Artificial Sequence: Synthetic oligonucleotide
ttctcttttctctttttctttgg

SEQ ID NO: 4055 - DNA, 23 bp, Artificial Sequence
  Description of Artificial Sequence: Synthetic oligonucleotide
agaaaaagagaaaagagaagagg

SEQ ID NO: 4056 - DNA, 23 bp, Artificial Sequence
  Description of Artificial Sequence: Synthetic oligonucleotide
gaaaaagagaaaagagaagaggg

SEQ ID NO: 4057 - DNA, 23 bp, Artificial Sequence
  Description of Artificial Sequence: Synthetic oligonucleotide
gaaaagagaagagggtcttcagg

SEQ ID NO: 4058 - DNA, 23 bp, Artificial Sequence
  Description of Artificial Sequence: Synthetic oligonucleotide
aaaagagaagagggtcttcaggg

SEQ ID NO: 4059 - DNA, 23 bp, Artificial Sequence
  Description of Artificial Sequence: Synthetic oligonucleotide
gctctattcccttgtaaatctgg

SEQ ID NO: 4060 - DNA, 23 bp, Artificial Sequence
  Description of Artificial Sequence: Synthetic oligonucleotide
taagaacttccagatttacaagg

SEQ ID NO: 4061 - DNA, 23 bp, Artificial Sequence
  Description of Artificial Sequence: Synthetic oligonucleotide
aagaacttccagatttacaaggg

SEQ ID NO: 4062 - DNA, 23 bp, Artificial Sequence
  Description of Artificial Sequence: Synthetic oligonucleotide
agggaatagagcatctgatttgg

SEQ ID NO: 4063 - DNA, 23 bp, Artificial Sequence
  Description of Artificial Sequence: Synthetic oligonucleotide
tctgatttggcatctgagagagg

SEQ ID NO: 4064 - DNA, 23 bp, Artificial Sequence
  Description of Artificial Sequence: Synthetic oligonucleotide
cctacaacctccttaagagaagg

SEQ ID NO: 4065 - DNA, 23 bp, Artificial Sequence
  Description of Artificial Sequence: Synthetic oligonucleotide
attagatcttccttctcttaagg

SEQ ID NO: 4066 - DNA, 23 bp, Artificial Sequence
  Description of Artificial Sequence: Synthetic oligonucleotide
agatcttccttctcttaaggagg

SEQ ID NO: 4067 - DNA, 23 bp, Artificial Sequence
  Description of Artificial Sequence: Synthetic oligonucleotide
ccttctcttaaggaggttgtagg

SEQ ID NO: 4068 - DNA, 23 bp, Artificial Sequence
  Description of Artificial Sequence: Synthetic oligonucleotide
cctgggtttggggggtgggatgg

SEQ ID NO: 4069 - DNA, 23 bp, Artificial Sequence
  Description of Artificial Sequence: Synthetic oligonucleotide
aagccctgggtttggggggtggg

SEQ ID NO: 4070 - DNA, 23 bp, Artificial Sequence
  Description of Artificial Sequence: Synthetic oligonucleotide
gaagccctgggtttggggggtgg

SEQ ID NO: 4071 - DNA, 23 bp, Artificial Sequence
  Description of Artificial Sequence: Synthetic oligonucleotide
agtgaagccctgggtttgggggg

SEQ ID NO: 4072 - DNA, 23 bp, Artificial Sequence
  Description of Artificial Sequence: Synthetic oligonucleotide
cagtgaagccctgggtttggggg

SEQ ID NO: 4073 - DNA, 23 bp, Artificial Sequence
  Description of Artificial Sequence: Synthetic oligonucleotide
tcagtgaagccctgggtttgggg

SEQ ID NO: 4074 - DNA, 23 bp, Artificial Sequence
  Description of Artificial Sequence: Synthetic oligonucleotide
ccatcccaccccccaaacccagg

SEQ ID NO: 4075 - DNA, 23 bp, Artificial Sequence
  Description of Artificial Sequence: Synthetic oligonucleotide
ctcagtgaagccctgggtttggg

SEQ ID NO: 4076 - DNA, 23 bp, Artificial Sequence
  Description of Artificial Sequence: Synthetic oligonucleotide
catcccaccccccaaacccaggg

SEQ ID NO: 4077 - DNA, 23 bp, Artificial Sequence
  Description of Artificial Sequence: Synthetic oligonucleotide
actcagtgaagccctgggtttgg

SEQ ID NO: 4078 - DNA, 23 bp, Artificial Sequence
  Description of Artificial Sequence: Synthetic oligonucleotide
gtacaactcagtgaagccctggg

SEQ ID NO: 4079 - DNA, 23 bp, Artificial Sequence
  Description of Artificial Sequence: Synthetic oligonucleotide
ggtacaactcagtgaagccctgg

SEQ ID NO: 4080 - DNA, 23 bp, Artificial Sequence
  Description of Artificial Sequence: Synthetic oligonucleotide
tcttgggatggtctggttcatgg

SEQ ID NO: 4081 - DNA, 23 bp, Artificial Sequence
  Description of Artificial Sequence: Synthetic oligonucleotide
aaaagcctcttgggatggtctgg

SEQ ID NO: 4082 - DNA, 23 bp, Artificial Sequence
  Description of Artificial Sequence: Synthetic oligonucleotide
actcaaaaagcctcttgggatgg

SEQ ID NO: 4083 - DNA, 23 bp, Artificial Sequence
  Description of Artificial Sequence: Synthetic oligonucleotide
atgaaccagaccatcccaagagg

SEQ ID NO: 4084 - DNA, 23 bp, Artificial Sequence
  Description of Artificial Sequence: Synthetic oligonucleotide
cagaactcaaaaagcctcttggg

SEQ ID NO: 4085 - DNA, 23 bp, Artificial Sequence
  Description of Artificial Sequence: Synthetic oligonucleotide
tcagaactcaaaaagcctcttgg

SEQ ID NO: 4086 - DNA, 23 bp, Artificial Sequence
  Description of Artificial Sequence: Synthetic oligonucleotide
tcaatgtgcagagcaagggaagg

SEQ ID NO: 4087 - DNA, 23 bp, Artificial Sequence
  Description of Artificial Sequence: Synthetic oligonucleotide
atcatcaatgtgcagagcaaggg

SEQ ID NO: 4088 - DNA, 23 bp, Artificial Sequence
  Description of Artificial Sequence: Synthetic oligonucleotide
tatcatcaatgtgcagagcaagg

SEQ ID NO: 4089 - DNA, 23 bp, Artificial Sequence
  Description of Artificial Sequence: Synthetic oligonucleotide
ctcggctggctatctgctttagg

SEQ ID NO: 4090 - DNA, 23 bp, Artificial Sequence
  Description of Artificial Sequence: Synthetic oligonucleotide
ggagatttctggagctcggctgg

SEQ ID NO: 4091 - DNA, 23 bp, Artificial Sequence
  Description of Artificial Sequence: Synthetic oligonucleotide
ccagggagatttctggagctcgg

SEQ ID NO: 4092 - DNA, 23 bp, Artificial Sequence
  Description of Artificial Sequence: Synthetic oligonucleotide
ggtgcagccagggagatttctgg

SEQ ID NO: 4093 - DNA, 23 bp, Artificial Sequence
  Description of Artificial Sequence: Synthetic oligonucleotide
ccgagctccagaaatctccctgg

SEQ ID NO: 4094 - DNA, 23 bp, Artificial Sequence
  Description of Artificial Sequence: Synthetic oligonucleotide
ggcctctgcaggtgcagccaggg

SEQ ID NO: 4095 - DNA, 23 bp, Artificial Sequence
  Description of Artificial Sequence: Synthetic oligonucleotide
tggcctctgcaggtgcagccagg

SEQ ID NO: 4096 - DNA, 23 bp, Artificial Sequence
  Description of Artificial Sequence: Synthetic oligonucleotide
ctccctggctgcacctgcagagg

SEQ ID NO: 4097 - DNA, 23 bp, Artificial Sequence
  Description of Artificial Sequence: Synthetic oligonucleotide
gaggggtcagtggcctctgcagg

SEQ ID NO: 4098 - DNA, 23 bp, Artificial Sequence
  Description of Artificial Sequence: Synthetic oligonucleotide
tccctccacagaggggtcagtgg

SEQ ID NO: 4099 - DNA, 23 bp, Artificial Sequence
  Description of Artificial Sequence: Synthetic oligonucleotide
agaggccactgacccctctgtgg

SEQ ID NO: 4100 - DNA, 23 bp, Artificial Sequence
  Description of Artificial Sequence: Synthetic oligonucleotide
agagcggtccctccacagagggg

SEQ ID NO: 4101 - DNA, 23 bp, Artificial Sequence
  Description of Artificial Sequence: Synthetic oligonucleotide
aagagcggtccctccacagaggg

SEQ ID NO: 4102 - DNA, 23 bp, Artificial Sequence
  Description of Artificial Sequence: Synthetic oligonucleotide
ggccactgacccctctgtggagg

SEQ ID NO: 4103 - DNA, 23 bp, Artificial Sequence
  Description of Artificial Sequence: Synthetic oligonucleotide
gaagagcggtccctccacagagg

SEQ ID NO: 4104 - DNA, 23 bp, Artificial Sequence
  Description of Artificial Sequence: Synthetic oligonucleotide
gccactgacccctctgtggaggg

SEQ ID NO: 4105 - DNA, 23 bp, Artificial Sequence
  Description of Artificial Sequence: Synthetic oligonucleotide
gccagccacacactgaagagcgg

SEQ ID NO: 4106 - DNA, 23 bp, Artificial Sequence
  Description of Artificial Sequence: Synthetic oligonucleotide
agggaccgctcttcagtgtgtgg

SEQ ID NO: 4107 - DNA, 23 bp, Artificial Sequence
  Description of Artificial Sequence: Synthetic oligonucleotide
accgctcttcagtgtgtggctgg

SEQ ID NO: 4108 - DNA, 23 bp, Artificial Sequence
  Description of Artificial Sequence: Synthetic oligonucleotide
tactctctgctcctctctcttgg

SEQ ID NO: 4109 - DNA, 23 bp, Artificial Sequence
  Description of Artificial Sequence: Synthetic oligonucleotide
atggctgaagaccaagagagagg

SEQ ID NO: 4110 - DNA, 23 bp, Artificial Sequence
  Description of Artificial Sequence: Synthetic oligonucleotide
agaaactggtgagcaatggatgg

SEQ ID NO: 4111 - DNA, 23 bp, Artificial Sequence
  Description of Artificial Sequence: Synthetic oligonucleotide
cgtgagaaactggtgagcaatgg

SEQ ID NO: 4112 - DNA, 23 bp, Artificial Sequence
  Description of Artificial Sequence: Synthetic oligonucleotide
ctatgctcctcgtgagaaactgg

SEQ ID NO: 4113 - DNA, 23 bp, Artificial Sequence
  Description of Artificial Sequence: Synthetic oligonucleotide
ttgctcaccagtttctcacgagg

SEQ ID NO: 4114 - DNA, 23 bp, Artificial Sequence
  Description of Artificial Sequence: Synthetic oligonucleotide
cagtttctcacgaggagcatagg

SEQ ID NO: 4115 - DNA, 23 bp, Artificial Sequence
  Description of Artificial Sequence: Synthetic oligonucleotide
gcataggaagatatgcatgtagg

SEQ ID NO: 4116 - DNA, 23 bp, Artificial Sequence
  Description of Artificial Sequence: Synthetic oligonucleotide
cataggaagatatgcatgtaggg

SEQ ID NO: 4117 - DNA, 23 bp, Artificial Sequence
  Description of Artificial Sequence: Synthetic oligonucleotide
aggaagatatgcatgtagggagg

SEQ ID NO: 4118 - DNA, 23 bp, Artificial Sequence
  Description of Artificial Sequence: Synthetic oligonucleotide
agatatgcatgtagggaggtagg

SEQ ID NO: 4119 - DNA, 23 bp, Artificial Sequence
  Description of Artificial Sequence: Synthetic oligonucleotide
tgcatgtagggaggtaggcacgg

SEQ ID NO: 4120 - DNA, 23 bp, Artificial Sequence
  Description of Artificial Sequence: Synthetic oligonucleotide
gcatgtagggaggtaggcacggg

SEQ ID NO: 4121 - DNA, 23 bp, Artificial Sequence
  Description of Artificial Sequence: Synthetic oligonucleotide
catgtagggaggtaggcacgggg

SEQ ID NO: 4122 - DNA, 23 bp, Artificial Sequence
  Description of Artificial Sequence: Synthetic oligonucleotide
atgacttgtttgactttagcagg

SEQ ID NO: 4123 - DNA, 23 bp, Artificial Sequence
  Description of Artificial Sequence: Synthetic oligonucleotide
ttcaagaatctcctcgcacctgg

SEQ ID NO: 4124 - DNA, 23 bp, Artificial Sequence
  Description of Artificial Sequence: Synthetic oligonucleotide
agcatctgaaaccaggtgcgagg

SEQ ID NO: 4125 - DNA, 23 bp, Artificial Sequence
  Description of Artificial Sequence: Synthetic oligonucleotide
ggaccccagcatctgaaaccagg

SEQ ID NO: 4126 - DNA, 23 bp, Artificial Sequence
  Description of Artificial Sequence: Synthetic oligonucleotide
tcgcacctggtttcagatgctgg

SEQ ID NO: 4127 - DNA, 23 bp, Artificial Sequence
  Description of Artificial Sequence: Synthetic oligonucleotide
cgcacctggtttcagatgctggg

SEQ ID NO: 4128 - DNA, 23 bp, Artificial Sequence
  Description of Artificial Sequence: Synthetic oligonucleotide
gcacctggtttcagatgctgggg

SEQ ID NO: 4129 - DNA, 23 bp, Artificial Sequence
  Description of Artificial Sequence: Synthetic oligonucleotide
cacagaagcctgtgacagacagg

SEQ ID NO: 4130 - DNA, 23 bp, Artificial Sequence
  Description of Artificial Sequence: Synthetic oligonucleotide
gctggggtcctgtctgtcacagg

SEQ ID NO: 4131 - DNA, 23 bp, Artificial Sequence
  Description of Artificial Sequence: Synthetic oligonucleotide
gacaaactcaagggggtaggagg

SEQ ID NO: 4132 - DNA, 23 bp, Artificial Sequence
  Description of Artificial Sequence: Synthetic oligonucleotide
tgtgacaaactcaagggggtagg

SEQ ID NO: 4133 - DNA, 23 bp, Artificial Sequence
  Description of Artificial Sequence: Synthetic oligonucleotide
gccatgtgacaaactcaaggggg

SEQ ID NO: 4134 - DNA, 23 bp, Artificial Sequence
  Description of Artificial Sequence: Synthetic oligonucleotide
ggccatgtgacaaactcaagggg

SEQ ID NO: 4135 - DNA, 23 bp, Artificial Sequence
  Description of Artificial Sequence: Synthetic oligonucleotide
gggccatgtgacaaactcaaggg

SEQ ID NO: 4136 - DNA, 23 bp, Artificial Sequence
  Description of Artificial Sequence: Synthetic oligonucleotide
agggccatgtgacaaactcaagg

SEQ ID NO: 4137 - DNA, 23 bp, Artificial Sequence
  Description of Artificial Sequence: Synthetic oligonucleotide
acccccttgagtttgtcacatgg

SEQ ID NO: 4138 - DNA, 23 bp, Artificial Sequence
  Description of Artificial Sequence: Synthetic oligonucleotide
agtttgtcacatggcccttcagg

SEQ ID NO: 4139 - DNA, 23 bp, Artificial Sequence
  Description of Artificial Sequence: Synthetic oligonucleotide
ctatctcaggccttcctgaaggg

SEQ ID NO: 4140 - DNA, 23 bp, Artificial Sequence
  Description of Artificial Sequence: Synthetic oligonucleotide
tgtcacatggcccttcaggaagg

SEQ ID NO: 4141 - DNA, 23 bp, Artificial Sequence
  Description of Artificial Sequence: Synthetic oligonucleotide
tctatctcaggccttcctgaagg

SEQ ID NO: 4142 - DNA, 23 bp, Artificial Sequence
  Description of Artificial Sequence: Synthetic oligonucleotide
acccagggcaaatctatctcagg

SEQ ID NO: 4143 - DNA, 23 bp, Artificial Sequence
  Description of Artificial Sequence: Synthetic oligonucleotide
ggcctgagatagatttgccctgg

SEQ ID NO: 4144 - DNA, 23 bp, Artificial Sequence
  Description of Artificial Sequence: Synthetic oligonucleotide
gcctgagatagatttgccctggg

SEQ ID NO: 4145 - DNA, 23 bp, Artificial Sequence
  Description of Artificial Sequence: Synthetic oligonucleotide
tgagatagatttgccctgggtgg

SEQ ID NO: 4146 - DNA, 23 bp, Artificial Sequence
  Description of Artificial Sequence: Synthetic oligonucleotide
gagatagatttgccctgggtggg

SEQ ID NO: 4147 - DNA, 23 bp, Artificial Sequence
  Description of Artificial Sequence: Synthetic oligonucleotide
tctcataggaggcccacccaggg

SEQ ID NO: 4148 - DNA, 23 bp, Artificial Sequence
  Description of Artificial Sequence: Synthetic oligonucleotide
ttctcataggaggcccacccagg

SEQ ID NO: 4149 - DNA, 23 bp, Artificial Sequence
  Description of Artificial Sequence: Synthetic oligonucleotide
acttaagattttctcataggagg

SEQ ID NO: 4150 - DNA, 23 bp, Artificial Sequence
  Description of Artificial Sequence: Synthetic oligonucleotide
ctcacttaagattttctcatagg

SEQ ID NO: 4151 - DNA, 23 bp, Artificial Sequence
  Description of Artificial Sequence: Synthetic oligonucleotide
ctatgagaaaatcttaagtgagg

SEQ ID NO: 4152 - DNA, 23 bp, Artificial Sequence
  Description of Artificial Sequence: Synthetic oligonucleotide
aaatcttaagtgaggcacccagg

SEQ ID NO: 4153 - DNA, 23 bp, Artificial Sequence
  Description of Artificial Sequence: Synthetic oligonucleotide
aggctctttccattttgcctggg

SEQ ID NO: 4154 - DNA, 23 bp, Artificial Sequence
  Description of Artificial Sequence: Synthetic oligonucleotide
aaggctctttccattttgcctgg

SEQ ID NO: 4155 - DNA, 23 bp, Artificial Sequence
  Description of Artificial Sequence: Synthetic oligonucleotide
agtgaggcacccaggcaaaatgg

SEQ ID NO: 4156 - DNA, 23 bp, Artificial Sequence
  Description of Artificial Sequence: Synthetic oligonucleotide
ggcttcctgctctgggcaaaagg

SEQ ID NO: 4157 - DNA, 23 bp, Artificial Sequence
  Description of Artificial Sequence: Synthetic oligonucleotide
aagagccttttgcccagagcagg

SEQ ID NO: 4158 - DNA, 23 bp, Artificial Sequence
  Description of Artificial Sequence: Synthetic oligonucleotide
gaagacaggcttcctgctctggg

SEQ ID NO: 4159 - DNA, 23 bp, Artificial Sequence
  Description of Artificial Sequence: Synthetic oligonucleotide
ggaagacaggcttcctgctctgg

SEQ ID NO: 4160 - DNA, 23 bp, Artificial Sequence
  Description of Artificial Sequence: Synthetic oligonucleotide
aacagctggaaatggaagacagg

SEQ ID NO: 4161 - DNA, 23 bp, Artificial Sequence
  Description of Artificial Sequence: Synthetic oligonucleotide
gtaggtggaacagctggaaatgg

SEQ ID NO: 4162 - DNA, 23 bp, Artificial Sequence
  Description of Artificial Sequence: Synthetic oligonucleotide
agctaagtaggtggaacagctgg

SEQ ID NO: 4163 - DNA, 23 bp, Artificial Sequence
  Description of Artificial Sequence: Synthetic oligonucleotide
cctcttttaagctaagtaggtgg

SEQ ID NO: 4164 - DNA, 23 bp, Artificial Sequence
  Description of Artificial Sequence: Synthetic oligonucleotide
gtgcctcttttaagctaagtagg

SEQ ID NO: 4165 - DNA, 23 bp, Artificial Sequence
  Description of Artificial Sequence: Synthetic oligonucleotide
ccacctacttagcttaaaagagg

SEQ ID NO: 4166 - DNA, 23 bp, Artificial Sequence
  Description of Artificial Sequence: Synthetic oligonucleotide
ctgagactgagactgaagacagg

SEQ ID NO: 4167 - DNA, 23 bp, Artificial Sequence
  Description of Artificial Sequence: Synthetic oligonucleotide
agtctcagtctcctcttctgtgg

SEQ ID NO: 4168 - DNA, 23 bp, Artificial Sequence
  Description of Artificial Sequence: Synthetic oligonucleotide
attgtcccattccacagaagagg

SEQ ID NO: 4169 - DNA, 23 bp, Artificial Sequence
  Description of Artificial Sequence: Synthetic oligonucleotide
cagtctcctcttctgtggaatgg

SEQ ID NO: 4170 - DNA, 23 bp, Artificial Sequence
  Description of Artificial Sequence: Synthetic oligonucleotide
agtctcctcttctgtggaatggg

SEQ ID NO: 4171 - DNA, 23 bp, Artificial Sequence
  Description of Artificial Sequence: Synthetic oligonucleotide
cctcacagcagtgtatgataagg

SEQ ID NO: 4172 - DNA, 23 bp, Artificial Sequence
  Description of Artificial Sequence: Synthetic oligonucleotide
ccttatcatacactgctgtgagg

SEQ ID NO: 4173 - DNA, 23 bp, Artificial Sequence
  Description of Artificial Sequence: Synthetic oligonucleotide
acactgctgtgaggactgagtgg

SEQ ID NO: 4174 - DNA, 23 bp, Artificial Sequence
  Description of Artificial Sequence: Synthetic oligonucleotide
gcaaagtgctaaatccacacagg

SEQ ID NO: 4175 - DNA, 23 bp, Artificial Sequence
  Description of Artificial Sequence: Synthetic oligonucleotide
attaattcaaatctcctgtgtgg

SEQ ID NO: 4176 - DNA, 23 bp, Artificial Sequence
  Description of Artificial Sequence: Synthetic oligonucleotide
ttgacagaccttcagtgtggtgg

SEQ ID NO: 4177 - DNA, 23 bp, Artificial Sequence
  Description of Artificial Sequence: Synthetic oligonucleotide
gaattaatccaccacactgaagg

SEQ ID NO: 4178 - DNA, 23 bp, Artificial Sequence
  Description of Artificial Sequence: Synthetic oligonucleotide
cccttgacagaccttcagtgtgg

SEQ ID NO: 4179 - DNA, 23 bp, Artificial Sequence
  Description of Artificial Sequence: Synthetic oligonucleotide
accacactgaaggtctgtcaagg

SEQ ID NO: 4180 - DNA, 23 bp, Artificial Sequence
  Description of Artificial Sequence: Synthetic oligonucleotide
ccacactgaaggtctgtcaaggg

SEQ ID NO: 4181 - DNA, 23 bp, Artificial Sequence
  Description of Artificial Sequence: Synthetic oligonucleotide
actgaaggtctgtcaagggcagg

SEQ ID NO: 4182 - DNA, 23 bp, Artificial Sequence
  Description of Artificial Sequence: Synthetic oligonucleotide
ctgaaggtctgtcaagggcaggg

SEQ ID NO: 4183 - DNA, 23 bp, Artificial Sequence
  Description of Artificial Sequence: Synthetic oligonucleotide
gtgttagactggggatactctgg

SEQ ID NO: 4184 - DNA, 23 bp, Artificial Sequence
  Description of Artificial Sequence: Synthetic oligonucleotide
ccaagtcctgtgttagactgggg

SEQ ID NO: 4185 - DNA, 23 bp, Artificial Sequence
  Description of Artificial Sequence: Synthetic oligonucleotide
gccaagtcctgtgttagactggg

SEQ ID NO: 4186 - DNA, 23 bp, Artificial Sequence
  Description of Artificial Sequence: Synthetic oligonucleotide
tgccaagtcctgtgttagactgg

SEQ ID NO: 4187 - DNA, 23 bp, Artificial Sequence
  Description of Artificial Sequence: Synthetic oligonucleotide
gagtatccccagtctaacacagg

SEQ ID NO: 4188 - DNA, 23 bp, Artificial Sequence
  Description of Artificial Sequence: Synthetic oligonucleotide
ccccagtctaacacaggacttgg

SEQ ID NO: 4189 - DNA, 23 bp, Artificial Sequence
  Description of Artificial Sequence: Synthetic oligonucleotide
gcatatgaaaagtgttcagtagg

SEQ ID NO: 4190 - DNA, 23 bp, Artificial Sequence
  Description of Artificial Sequence: Synthetic oligonucleotide
atgaaaagtgttcagtaggccgg

SEQ ID NO: 4191 - DNA, 23 bp, Artificial Sequence
  Description of Artificial Sequence: Synthetic oligonucleotide
tgaaaagtgttcagtaggccggg

SEQ ID NO: 4192 - DNA, 23 bp, Artificial Sequence
  Description of Artificial Sequence: Synthetic oligonucleotide
caggcatgagccactgcacccgg

SEQ ID NO: 4193 - DNA, 23 bp, Artificial Sequence
  Description of Artificial Sequence: Synthetic oligonucleotide
gttcagtaggccgggtgcagtgg

SEQ ID NO: 4194 - DNA, 23 bp, Artificial Sequence
  Description of Artificial Sequence: Synthetic oligonucleotide
tcccaaagtgctgggattacagg

SEQ ID NO: 4195 - DNA, 23 bp, Artificial Sequence
  Description of Artificial Sequence: Synthetic oligonucleotide
ctttggcctcccaaagtgctggg

SEQ ID NO: 4196 - DNA, 23 bp, Artificial Sequence
  Description of Artificial Sequence: Synthetic oligonucleotide
tgcctgtaatcccagcactttgg

SEQ ID NO: 4197 - DNA, 23 bp, Artificial Sequence
  Description of Artificial Sequence: Synthetic oligonucleotide
actttggcctcccaaagtgctgg

SEQ ID NO: 4198 - DNA, 23 bp, Artificial Sequence
  Description of Artificial Sequence: Synthetic oligonucleotide
gcctgtaatcccagcactttggg

SEQ ID NO: 4199 - DNA, 23 bp, Artificial Sequence
  Description of Artificial Sequence: Synthetic oligonucleotide
tgtaatcccagcactttgggagg

SEQ ID NO: 4200 - DNA, 23 bp, Artificial Sequence
  Description of Artificial Sequence: Synthetic oligonucleotide
agcactttgggaggccaaagtgg

SEQ ID NO: 4201 - DNA, 23 bp, Artificial Sequence
  Description of Artificial Sequence: Synthetic oligonucleotide
gcactttgggaggccaaagtggg

SEQ ID NO: 4202 - DNA, 23 bp, Artificial Sequence
  Description of Artificial Sequence: Synthetic oligonucleotide
ctcagatgatccgcccactttgg

SEQ ID NO: 4203 - DNA, 23 bp, Artificial Sequence
  Description of Artificial Sequence: Synthetic oligonucleotide
ctttgggaggccaaagtgggcgg

SEQ ID NO: 4204 - DNA, 23 bp, Artificial Sequence
  Description of Artificial Sequence: Synthetic oligonucleotide
caaagtgggcggatcatctgagg

SEQ ID NO: 4205 - DNA, 23 bp, Artificial Sequence
  Description of Artificial Sequence: Synthetic oligonucleotide
tgggcggatcatctgaggtcagg

SEQ ID NO: 4206 - DNA, 23 bp, Artificial Sequence
  Description of Artificial Sequence: Synthetic oligonucleotide
tcaggagttcaagtccagcctgg

SEQ ID NO: 4207 - DNA, 23 bp, Artificial Sequence
  Description of Artificial Sequence: Synthetic oligonucleotide
tttcaccacgttggccaggctgg

SEQ ID NO: 4208 - DNA, 23 bp, Artificial Sequence
  Description of Artificial Sequence: Synthetic oligonucleotide
gtggtttcaccacgttggccagg

SEQ ID NO: 4209 - DNA, 23 bp, Artificial Sequence
  Description of Artificial Sequence: Synthetic oligonucleotide
caagtccagcctggccaacgtgg

SEQ ID NO: 4210 - DNA, 23 bp, Artificial Sequence
  Description of Artificial Sequence: Synthetic oligonucleotide
gagatgtggtttcaccacgttgg

SEQ ID NO: 4211 - DNA, 23 bp, Artificial Sequence
  Description of Artificial Sequence: Synthetic oligonucleotide
ttgtatttttagtagagatgtgg

SEQ ID NO: 4212 - DNA, 23 bp, Artificial Sequence
  Description of Artificial Sequence: Synthetic oligonucleotide
actaaaaatacaaaattagctgg

SEQ ID NO: 4213 - DNA, 23 bp, Artificial Sequence
  Description of Artificial Sequence: Synthetic oligonucleotide
ctaaaaatacaaaattagctggg

SEQ ID NO: 4214 - DNA, 23 bp, Artificial Sequence
  Description of Artificial Sequence: Synthetic oligonucleotide
aatacaaaattagctgggcgtgg

SEQ ID NO: 4215 - DNA, 23 bp, Artificial Sequence
  Description of Artificial Sequence: Synthetic oligonucleotide
acaaaattagctgggcgtggtgg

SEQ ID NO: 4216 - DNA, 23 bp, Artificial Sequence
  Description of Artificial Sequence: Synthetic oligonucleotide
tccagagtagctgtgattacagg

SEQ ID NO: 4217 - DNA, 23 bp, Artificial Sequence
  Description of Artificial Sequence: Synthetic oligonucleotide
gcctgtaatcacagctactctgg

SEQ ID NO: 4218 - DNA, 23 bp, Artificial Sequence
  Description of Artificial Sequence: Synthetic oligonucleotide
tgtaatcacagctactctggagg

SEQ ID NO: 4219 - DNA, 23 bp, Artificial Sequence
  Description of Artificial Sequence: Synthetic oligonucleotide
cacagctactctggaggctgagg

SEQ ID NO: 4220 - DNA, 23 bp, Artificial Sequence
  Description of Artificial Sequence: Synthetic oligonucleotide
gctactctggaggctgaggcagg

SEQ ID NO: 4221 - DNA, 23 bp, Artificial Sequence
  Description of Artificial Sequence: Synthetic oligonucleotide
caggagaatcacttgaacccagg

SEQ ID NO: 4222 - DNA, 23 bp, Artificial Sequence
  Description of Artificial Sequence: Synthetic oligonucleotide
gagaatcacttgaacccaggagg

SEQ ID NO: 4223 - DNA, 23 bp, Artificial Sequence
  Description of Artificial Sequence: Synthetic oligonucleotide
aatcacttgaacccaggaggcgg

SEQ ID NO: 4224 - DNA, 23 bp, Artificial Sequence
  Description of Artificial Sequence: Synthetic oligonucleotide
cactgcaacctccgcctcctggg

SEQ ID NO: 4225 - DNA, 23 bp, Artificial Sequence
  Description of Artificial Sequence: Synthetic oligonucleotide
tcactgcaacctccgcctcctgg

SEQ ID NO: 4226 - DNA, 23 bp, Artificial Sequence
  Description of Artificial Sequence: Synthetic oligonucleotide
cacttgaacccaggaggcggagg

SEQ ID NO: 4227 - DNA, 23 bp, Artificial Sequence
  Description of Artificial Sequence: Synthetic oligonucleotide
tcgcccaggctggagtgcagtgg

SEQ ID NO: 4228 - DNA, 23 bp, Artificial Sequence
  Description of Artificial Sequence: Synthetic oligonucleotide
catgccactgcactccagcctgg

SEQ ID NO: 4229 - DNA, 23 bp, Artificial Sequence
  Description of Artificial Sequence: Synthetic oligonucleotide
atgccactgcactccagcctggg

SEQ ID NO: 4230 - DNA, 23 bp, Artificial Sequence
  Description of Artificial Sequence: Synthetic oligonucleotide
ttcaatcttgtcgcccaggctgg

SEQ ID NO: 4231 - DNA, 23 bp, Artificial Sequence
  Description of Artificial Sequence: Synthetic oligonucleotide
gagtttcaatcttgtcgcccagg

SEQ ID NO: 4232 - DNA, 23 bp, Artificial Sequence
  Description of Artificial Sequence: Synthetic oligonucleotide
cttgttctttgtttttgagatgg

SEQ ID NO: 4233 - DNA, 23 bp, Artificial Sequence
  Description of Artificial Sequence: Synthetic oligonucleotide
catctcaaaaacaaagaacaagg

SEQ ID NO: 4234 - DNA, 23 bp, Artificial Sequence
  Description of Artificial Sequence: Synthetic oligonucleotide
ctaaaagaaaaacagagtagtgg

SEQ ID NO: 4235 - DNA, 23 bp, Artificial Sequence
  Description of Artificial Sequence: Synthetic oligonucleotide
gactggctgcagagtcagtgggg

SEQ ID NO: 4236 - DNA, 23 bp, Artificial Sequence
  Description of Artificial Sequence: Synthetic oligonucleotide
ggactggctgcagagtcagtggg

SEQ ID NO: 4237 - DNA, 23 bp, Artificial Sequence
  Description of Artificial Sequence: Synthetic oligonucleotide
aggactggctgcagagtcagtgg

SEQ ID NO: 4238 - DNA, 23 bp, Artificial Sequence
  Description of Artificial Sequence: Synthetic oligonucleotide
tgccacatgaagaaaaggactgg

SEQ ID NO: 4239 - DNA, 23 bp, Artificial Sequence
  Description of Artificial Sequence: Synthetic oligonucleotide
ccaactgccacatgaagaaaagg

SEQ ID NO: 4240 - DNA, 23 bp, Artificial Sequence
  Description of Artificial Sequence: Synthetic oligonucleotide
agccagtccttttcttcatgtgg

SEQ ID NO: 4241 - DNA, 23 bp, Artificial Sequence
  Description of Artificial Sequence: Synthetic oligonucleotide
ccttttcttcatgtggcagttgg

SEQ ID NO: 4242 - DNA, 23 bp, Artificial Sequence
  Description of Artificial Sequence: Synthetic oligonucleotide
tttcttcatgtggcagttggtgg

SEQ ID NO: 4243 - DNA, 23 bp, Artificial Sequence
  Description of Artificial Sequence: Synthetic oligonucleotide
cactctgcaatcagtcacatagg

SEQ ID NO: 4244 - DNA, 23 bp, Artificial Sequence
  Description of Artificial Sequence: Synthetic oligonucleotide
tgactgattgcagagtgaattgg

SEQ ID NO: 4245 - DNA, 23 bp, Artificial Sequence
  Description of Artificial Sequence: Synthetic oligonucleotide
gactgattgcagagtgaattggg

SEQ ID NO: 4246 - DNA, 23 bp, Artificial Sequence
  Description of Artificial Sequence: Synthetic oligonucleotide
cagagtgaattgggagctgttgg

SEQ ID NO: 4247 - DNA, 23 bp, Artificial Sequence
  Description of Artificial Sequence: Synthetic oligonucleotide
gttttgaatgcaccacactaagg

SEQ ID NO: 4248 - DNA, 23 bp, Artificial Sequence
  Description of Artificial Sequence: Synthetic oligonucleotide
tgtcctcacattccttagtgtgg

SEQ ID NO: 4249 - DNA, 23 bp, Artificial Sequence
  Description of Artificial Sequence: Synthetic oligonucleotide
gcaccacactaaggaatgtgagg

SEQ ID NO: 4250 - DNA, 23 bp, Artificial Sequence
  Description of Artificial Sequence: Synthetic oligonucleotide
tgaggacacattgctctttgcgg

SEQ ID NO: 4251 - DNA, 23 bp, Artificial Sequence
  Description of Artificial Sequence: Synthetic oligonucleotide
cgaggggagctaatatagctggg

SEQ ID NO: 4252 - DNA, 23 bp, Artificial Sequence
  Description of Artificial Sequence: Synthetic oligonucleotide
ccgaggggagctaatatagctgg

SEQ ID NO: 4253 - DNA, 23 bp, Artificial Sequence
  Description of Artificial Sequence: Synthetic oligonucleotide
ccagctatattagctcccctcgg

SEQ ID NO: 4254 - DNA, 23 bp, Artificial Sequence
  Description of Artificial Sequence: Synthetic oligonucleotide
aaaactgggctgtgtccgagggg

SEQ ID NO: 4255 - DNA, 23 bp, Artificial Sequence
  Description of Artificial Sequence: Synthetic oligonucleotide
gaaaactgggctgtgtccgaggg

SEQ ID NO: 4256 - DNA, 23 bp, Artificial Sequence
  Description of Artificial Sequence: Synthetic oligonucleotide
agaaaactgggctgtgtccgagg

SEQ ID NO: 4257 - DNA, 23 bp, Artificial Sequence
  Description of Artificial Sequence: Synthetic oligonucleotide
ccacgcgaatacagaaaactggg

SEQ ID NO: 4258 - DNA, 23 bp, Artificial Sequence
  Description of Artificial Sequence: Synthetic oligonucleotide
tccacgcgaatacagaaaactgg

SEQ ID NO: 4259 - DNA, 23 bp, Artificial Sequence
  Description of Artificial Sequence: Synthetic oligonucleotide
cccagttttctgtattcgcgtgg

SEQ ID NO: 4260 - DNA, 23 bp, Artificial Sequence
  Description of Artificial Sequence: Synthetic oligonucleotide
gaggagtgctgggaatcgcgcgg

SEQ ID NO: 4261 - DNA, 23 bp, Artificial Sequence
  Description of Artificial Sequence: Synthetic oligonucleotide
gatgctgtaagaggagtgctggg

SEQ ID NO: 4262 - DNA, 23 bp, Artificial Sequence
  Description of Artificial Sequence: Synthetic oligonucleotide
agatgctgtaagaggagtgctgg

SEQ ID NO: 4263 - DNA, 23 bp, Artificial Sequence
  Description of Artificial Sequence: Synthetic oligonucleotide
ctgaggtgagatgctgtaagagg

SEQ ID NO: 4264 - DNA, 23 bp, Artificial Sequence
  Description of Artificial Sequence: Synthetic oligonucleotide
gaggcaaggaacatacactgagg

SEQ ID NO: 4265 - DNA, 23 bp, Artificial Sequence
  Description of Artificial Sequence: Synthetic oligonucleotide
gttcaactgcactggaggcaagg

SEQ ID NO: 4266 - DNA, 23 bp, Artificial Sequence
  Description of Artificial Sequence: Synthetic oligonucleotide
ctgaggttcaactgcactggagg

SEQ ID NO: 4267 - DNA, 23 bp, Artificial Sequence
  Description of Artificial Sequence: Synthetic oligonucleotide
ggactgaggttcaactgcactgg

SEQ ID NO: 4268 - DNA, 23 bp, Artificial Sequence
  Description of Artificial Sequence: Synthetic oligonucleotide
catgaggagaggcaggactgagg

SEQ ID NO: 4269 - DNA, 23 bp, Artificial Sequence
  Description of Artificial Sequence: Synthetic oligonucleotide
atgcacacatgaggagaggcagg

SEQ ID NO: 4270 - DNA, 23 bp, Artificial Sequence
  Description of Artificial Sequence: Synthetic oligonucleotide
gtgaatgcacacatgaggagagg

SEQ ID NO: 4271 - DNA, 23 bp, Artificial Sequence
  Description of Artificial Sequence: Synthetic oligonucleotide
gaaaggtgaatgcacacatgagg

SEQ ID NO: 4272 - DNA, 23 bp, Artificial Sequence
  Description of Artificial Sequence: Synthetic oligonucleotide
atgtgtgcattcacctttcttgg

SEQ ID NO: 4273 - DNA, 23 bp, Artificial Sequence
  Description of Artificial Sequence: Synthetic oligonucleotide
tggggagagagcaccaagaaagg

SEQ ID NO: 4274 - DNA, 23 bp, Artificial Sequence
  Description of Artificial Sequence: Synthetic oligonucleotide
ttcttggtgctctctccccatgg

SEQ ID NO: 4275 - DNA, 23 bp, Artificial Sequence
  Description of Artificial Sequence: Synthetic oligonucleotide
tcttggtgctctctccccatggg

SEQ ID NO: 4276 - DNA, 23 bp, Artificial Sequence
  Description of Artificial Sequence: Synthetic oligonucleotide
atggtagaacttggcccatgggg

SEQ ID NO: 4277 - DNA, 23 bp, Artificial Sequence
  Description of Artificial Sequence: Synthetic oligonucleotide
catggtagaacttggcccatggg

SEQ ID NO: 4278 - DNA, 23 bp, Artificial Sequence
  Description of Artificial Sequence: Synthetic oligonucleotide
tcatggtagaacttggcccatgg

SEQ ID NO: 4279 - DNA, 23 bp, Artificial Sequence
  Description of Artificial Sequence: Synthetic oligonucleotide
tcataactcatggtagaacttgg

SEQ ID NO: 4280 - DNA, 23 bp, Artificial Sequence
  Description of Artificial Sequence: Synthetic oligonucleotide
ccataatgtttcataactcatgg

SEQ ID NO: 4281 - DNA, 23 bp, Artificial Sequence
  Description of Artificial Sequence: Synthetic oligonucleotide
ccatgagttatgaaacattatgg

SEQ ID NO: 4282 - DNA, 23 bp, Artificial Sequence
  Description of Artificial Sequence: Synthetic oligonucleotide
ttatggagaaaacatgtctttgg

SEQ ID NO: 4283 - DNA, 23 bp, Artificial Sequence
  Description of Artificial Sequence: Synthetic oligonucleotide
aggggcactggtgggctttctgg

SEQ ID NO: 4284 - DNA, 23 bp, Artificial Sequence
  Description of Artificial Sequence: Synthetic oligonucleotide
cgtgactgaggggcactggtggg

SEQ ID NO: 4285 - DNA, 23 bp, Artificial Sequence
  Description of Artificial Sequence: Synthetic oligonucleotide
ccgtgactgaggggcactggtgg

SEQ ID NO: 4286 - DNA, 23 bp, Artificial Sequence
  Description of Artificial Sequence: Synthetic oligonucleotide
caaccgtgactgaggggcactgg

SEQ ID NO: 4287 - DNA, 23 bp, Artificial Sequence
  Description of Artificial Sequence: Synthetic oligonucleotide
tcataacaaccgtgactgagggg

SEQ ID NO: 4288 - DNA, 23 bp, Artificial Sequence
  Description of Artificial Sequence: Synthetic oligonucleotide
ttcataacaaccgtgactgaggg

SEQ ID NO: 4289 - DNA, 23 bp, Artificial Sequence
  Description of Artificial Sequence: Synthetic oligonucleotide
ccaccagtgcccctcagtcacgg

SEQ ID NO: 4290 - DNA, 23 bp, Artificial Sequence
  Description of Artificial Sequence: Synthetic oligonucleotide
attcataacaaccgtgactgagg

SEQ ID NO: 4291 - DNA, 23 bp, Artificial Sequence
  Description of Artificial Sequence: Synthetic oligonucleotide
tgttatgaatgacatgctaatgg

SEQ ID NO: 4292 - DNA, 23 bp, Artificial Sequence
  Description of Artificial Sequence: Synthetic oligonucleotide
acatgctaatggtttcactctgg

SEQ ID NO: 4293 - DNA, 23 bp, Artificial Sequence
  Description of Artificial Sequence: Synthetic oligonucleotide
ctgaagaggaaagaaaaggcagg

SEQ ID NO: 4294 - DNA, 23 bp, Artificial Sequence
  Description of Artificial Sequence: Synthetic oligonucleotide
aggctaggcgcaaacctagcagg

SEQ ID NO: 4295 - DNA, 23 bp, Artificial Sequence
  Description of Artificial Sequence: Synthetic oligonucleotide
gacctgaggctgctcaggctagg

SEQ ID NO: 4296 - DNA, 23 bp, Artificial Sequence
  Description of Artificial Sequence: Synthetic oligonucleotide
cagaggacctgaggctgctcagg

SEQ ID NO: 4297 - DNA, 23 bp, Artificial Sequence
  Description of Artificial Sequence: Synthetic oligonucleotide
cgcctagcctgagcagcctcagg

SEQ ID NO: 4298 - DNA, 23 bp, Artificial Sequence
  Description of Artificial Sequence: Synthetic oligonucleotide
tggcccaaacagaggacctgagg

SEQ ID NO: 4299 - DNA, 23 bp, Artificial Sequence
  Description of Artificial Sequence: Synthetic oligonucleotide
gcagcctcaggtcctctgtttgg

SEQ ID NO: 4300 - DNA, 23 bp, Artificial Sequence
  Description of Artificial Sequence: Synthetic oligonucleotide
cagcctcaggtcctctgtttggg

SEQ ID NO: 4301 - DNA, 23 bp, Artificial Sequence
  Description of Artificial Sequence: Synthetic oligonucleotide
ctcctctatggcccaaacagagg

SEQ ID NO: 4302 - DNA, 23 bp, Artificial Sequence
  Description of Artificial Sequence: Synthetic oligonucleotide
gtcctctgtttgggccatagagg

SEQ ID NO: 4303 - DNA, 23 bp, Artificial Sequence
  Description of Artificial Sequence: Synthetic oligonucleotide
gggctggagaggctcctctatgg

SEQ ID NO: 4304 - DNA, 23 bp, Artificial Sequence
  Description of Artificial Sequence: Synthetic oligonucleotide
aaggaagacaggggctggagagg

SEQ ID NO: 4305 - DNA, 23 bp, Artificial Sequence
  Description of Artificial Sequence: Synthetic oligonucleotide
cagccaaggaagacaggggctgg

SEQ ID NO: 4306 - DNA, 23 bp, Artificial Sequence
  Description of Artificial Sequence: Synthetic oligonucleotide
ggagcagccaaggaagacagggg

SEQ ID NO: 4307 - DNA, 23 bp, Artificial Sequence
  Description of Artificial Sequence: Synthetic oligonucleotide
gggagcagccaaggaagacaggg

SEQ ID NO: 4308 - DNA, 23 bp, Artificial Sequence
  Description of Artificial Sequence: Synthetic oligonucleotide
ggggagcagccaaggaagacagg

SEQ ID NO: 4309 - DNA, 23 bp, Artificial Sequence
  Description of Artificial Sequence: Synthetic oligonucleotide
tctccagcccctgtcttccttgg

SEQ ID NO: 4310 - DNA, 23 bp, Artificial Sequence
  Description of Artificial Sequence: Synthetic oligonucleotide
agagccctggggagcagccaagg

SEQ ID NO: 4311 - DNA, 23 bp, Artificial Sequence
  Description of Artificial Sequence: Synthetic oligonucleotide
gtcttccttggctgctccccagg

SEQ ID NO: 4312 - DNA, 23 bp, Artificial Sequence
  Description of Artificial Sequence: Synthetic oligonucleotide
tcttccttggctgctccccaggg

SEQ ID NO: 4313 - DNA, 23 bp, Artificial Sequence
  Description of Artificial Sequence: Synthetic oligonucleotide
gaagttttaagagagccctgggg

SEQ ID NO: 4314 - DNA, 23 bp, Artificial Sequence
  Description of Artificial Sequence: Synthetic oligonucleotide
agaagttttaagagagccctggg

SEQ ID NO: 4315 - DNA, 23 bp, Artificial Sequence
  Description of Artificial Sequence: Synthetic oligonucleotide
gagaagttttaagagagccctgg

SEQ ID NO: 4316 - DNA, 23 bp, Artificial Sequence
  Description of Artificial Sequence: Synthetic oligonucleotide
aggatgcctcagtgggagtgggg

SEQ ID NO: 4317 - DNA, 23 bp, Artificial Sequence
  Description of Artificial Sequence: Synthetic oligonucleotide
gaggatgcctcagtgggagtggg

SEQ ID NO: 4318 - DNA, 23 bp, Artificial Sequence
  Description of Artificial Sequence: Synthetic oligonucleotide
tgaggatgcctcagtgggagtgg

SEQ ID NO: 4319 - DNA, 23 bp, Artificial Sequence
  Description of Artificial Sequence: Synthetic oligonucleotide
acttctccccactcccactgagg

SEQ ID NO: 4320 - DNA, 23 bp, Artificial Sequence
  Description of Artificial Sequence: Synthetic oligonucleotide
ggggctgaggatgcctcagtggg

SEQ ID NO: 4321 - DNA, 23 bp, Artificial Sequence
  Description of Artificial Sequence: Synthetic oligonucleotide
tggggctgaggatgcctcagtgg

SEQ ID NO: 4322 - DNA, 23 bp, Artificial Sequence
  Description of Artificial Sequence: Synthetic oligonucleotide
tttgacacaggctggggctgagg

SEQ ID NO: 4323 - DNA, 23 bp, Artificial Sequence
  Description of Artificial Sequence: Synthetic oligonucleotide
tctgaatttgacacaggctgggg

SEQ ID NO: 4324 - DNA, 23 bp, Artificial Sequence
  Description of Artificial Sequence: Synthetic oligonucleotide
ctctgaatttgacacaggctggg

SEQ ID NO: 4325 - DNA, 23 bp, Artificial Sequence
  Description of Artificial Sequence: Synthetic oligonucleotide
actctgaatttgacacaggctgg

SEQ ID NO: 4326 - DNA, 23 bp, Artificial Sequence
  Description of Artificial Sequence: Synthetic oligonucleotide
ctttactctgaatttgacacagg

SEQ ID NO: 4327 - DNA, 23 bp, Artificial Sequence
  Description of Artificial Sequence: Synthetic oligonucleotide
aaattcagagtaaagaaccaagg

SEQ ID NO: 4328 - DNA, 23 bp, Artificial Sequence
  Description of Artificial Sequence: Synthetic oligonucleotide
tgaaagccagggagttgccttgg

SEQ ID NO: 4329 - DNA, 23 bp, Artificial Sequence
  Description of Artificial Sequence: Synthetic oligonucleotide
aaagaaccaaggcaactccctgg

SEQ ID NO: 4330 - DNA, 23 bp, Artificial Sequence
  Description of Artificial Sequence: Synthetic oligonucleotide
gctttggcccatgaaagccaggg

SEQ ID NO: 4331 - DNA, 23 bp, Artificial Sequence
  Description of Artificial Sequence: Synthetic oligonucleotide
cgctttggcccatgaaagccagg

SEQ ID NO: 4332 - DNA, 23 bp, Artificial Sequence
  Description of Artificial Sequence: Synthetic oligonucleotide
aggcaactccctggctttcatgg

SEQ ID NO: 4333 - DNA, 23 bp, Artificial Sequence
  Description of Artificial Sequence: Synthetic oligonucleotide
ggcaactccctggctttcatggg

SEQ ID NO: 4334 - DNA, 23 bp, Artificial Sequence
  Description of Artificial Sequence: Synthetic oligonucleotide
gctttcatgggccaaagcgcagg

SEQ ID NO: 4335 - DNA, 23 bp, Artificial Sequence
  Description of Artificial Sequence: Synthetic oligonucleotide
cggtgtgaaagcctgcgctttgg

SEQ ID NO: 4336 - DNA, 23 bp, Artificial Sequence
  Description of Artificial Sequence: Synthetic oligonucleotide
aagcgcaggctttcacaccgagg

SEQ ID NO: 4337 - DNA, 23 bp, Artificial Sequence
  Description of Artificial Sequence: Synthetic oligonucleotide
gatctgaggctcagaggcctcgg

SEQ ID NO: 4338 - DNA, 23 bp, Artificial Sequence
  Description of Artificial Sequence: Synthetic oligonucleotide
ccccatgatctgaggctcagagg

SEQ ID NO: 4339 - DNA, 23 bp, Artificial Sequence
  Description of Artificial Sequence: Synthetic oligonucleotide
agtgacttccccatgatctgagg

SEQ ID NO: 4340 - DNA, 23 bp, Artificial Sequence
  Description of Artificial Sequence: Synthetic oligonucleotide
ggcctctgagcctcagatcatgg

SEQ ID NO: 4341 - DNA, 23 bp, Artificial Sequence
  Description of Artificial Sequence: Synthetic oligonucleotide
gcctctgagcctcagatcatggg

SEQ ID NO: 4342 - DNA, 23 bp, Artificial Sequence
  Description of Artificial Sequence: Synthetic oligonucleotide
cctctgagcctcagatcatgggg

SEQ ID NO: 4343 - DNA, 23 bp, Artificial Sequence
  Description of Artificial Sequence: Synthetic oligonucleotide
gatcatggggaagtcactgctgg

SEQ ID NO: 4344 - DNA, 23 bp, Artificial Sequence
  Description of Artificial Sequence: Synthetic oligonucleotide
ggagagaacagacatagctctgg

SEQ ID NO: 4345 - DNA, 23 bp, Artificial Sequence
  Description of Artificial Sequence: Synthetic oligonucleotide
gggctgccctcttgggcagatgg

SEQ ID NO: 4346 - DNA, 23 bp, Artificial Sequence
  Description of Artificial Sequence: Synthetic oligonucleotide
ctggaagccatctgcccaagagg

SEQ ID NO: 4347 - DNA, 23 bp, Artificial Sequence
  Description of Artificial Sequence: Synthetic oligonucleotide
tggaagccatctgcccaagaggg

SEQ ID NO: 4348 - DNA, 23 bp, Artificial Sequence
  Description of Artificial Sequence: Synthetic oligonucleotide
ttgggatgggctgccctcttggg

SEQ ID NO: 4349 - DNA, 23 bp, Artificial Sequence
  Description of Artificial Sequence: Synthetic oligonucleotide
cttgggatgggctgccctcttgg

SEQ ID NO: 4350 - DNA, 23 bp, Artificial Sequence
  Description of Artificial Sequence: Synthetic oligonucleotide
ctgtaagatgaacttgggatggg

SEQ ID NO: 4351 - DNA, 23 bp, Artificial Sequence
  Description of Artificial Sequence: Synthetic oligonucleotide
actgtaagatgaacttgggatgg

SEQ ID NO: 4352 - DNA, 23 bp, Artificial Sequence
  Description of Artificial Sequence: Synthetic oligonucleotide
ggccactgtaagatgaacttggg

SEQ ID NO: 4353 - DNA, 23 bp, Artificial Sequence
  Description of Artificial Sequence: Synthetic oligonucleotide
tggccactgtaagatgaacttgg

SEQ ID NO: 4354 - DNA, 23 bp, Artificial Sequence
  Description of Artificial Sequence: Synthetic oligonucleotide
atcccaagttcatcttacagtgg

SEQ ID NO: 4355 - DNA, 23 bp, Artificial Sequence
  Description of Artificial Sequence: Synthetic oligonucleotide
aagttcatcttacagtggccagg

SEQ ID NO: 4356 - DNA, 23 bp, Artificial Sequence
  Description of Artificial Sequence: Synthetic oligonucleotide
gccccggctcagggcaggcctgg

SEQ ID NO: 4357 - DNA, 23 bp, Artificial Sequence
  Description of Artificial Sequence: Synthetic oligonucleotide
cagaggccccggctcagggcagg

SEQ ID NO: 4358 - DNA, 23 bp, Artificial Sequence
  Description of Artificial Sequence: Synthetic oligonucleotide
tggccaggcctgccctgagccgg

SEQ ID NO: 4359 - DNA, 23 bp, Artificial Sequence
  Description of Artificial Sequence: Synthetic oligonucleotide
ggccaggcctgccctgagccggg

SEQ ID NO: 4360 - DNA, 23 bp, Artificial Sequence
  Description of Artificial Sequence: Synthetic oligonucleotide
gacccagaggccccggctcaggg

SEQ ID NO: 4361 - DNA, 23 bp, Artificial Sequence
  Description of Artificial Sequence: Synthetic oligonucleotide
gccaggcctgccctgagccgggg

SEQ ID NO: 4362 - DNA, 23 bp, Artificial Sequence
  Description of Artificial Sequence: Synthetic oligonucleotide
tgacccagaggccccggctcagg

SEQ ID NO: 4363 - DNA, 23 bp, Artificial Sequence
  Description of Artificial Sequence: Synthetic oligonucleotide
gaagagtgacccagaggccccgg

SEQ ID NO: 4364 - DNA, 23 bp, Artificial Sequence
  Description of Artificial Sequence: Synthetic oligonucleotide
ctgccctgagccggggcctctgg

SEQ ID NO: 4365 - DNA, 23 bp, Artificial Sequence
  Description of Artificial Sequence: Synthetic oligonucleotide
tgccctgagccggggcctctggg

SEQ ID NO: 4366 - DNA, 23 bp, Artificial Sequence
  Description of Artificial Sequence: Synthetic oligonucleotide
acagcagaagagtgacccagagg

SEQ ID NO: 4367 - DNA, 23 bp, Artificial Sequence
  Description of Artificial Sequence: Synthetic oligonucleotide
ggtcactcttctgctgtccatgg

SEQ ID NO: 4368 - DNA, 23 bp, Artificial Sequence
  Description of Artificial Sequence: Synthetic oligonucleotide
acccaggatgggcaatgccatgg

SEQ ID NO: 4369 - DNA, 23 bp, Artificial Sequence
  Description of Artificial Sequence: Synthetic oligonucleotide
gtccatggcattgcccatcctgg

SEQ ID NO: 4370 - DNA, 23 bp, Artificial Sequence
  Description of Artificial Sequence: Synthetic oligonucleotide
tccatggcattgcccatcctggg

SEQ ID NO: 4371 - DNA, 23 bp, Artificial Sequence
  Description of Artificial Sequence: Synthetic oligonucleotide
gccccagcctcacccaggatggg

SEQ ID NO: 4372 - DNA, 23 bp, Artificial Sequence
  Description of Artificial Sequence: Synthetic oligonucleotide
agccccagcctcacccaggatgg

SEQ ID NO: 4373 - DNA, 23 bp, Artificial Sequence
  Description of Artificial Sequence: Synthetic oligonucleotide
ggcattgcccatcctgggtgagg

SEQ ID NO: 4374 - DNA, 23 bp, Artificial Sequence
  Description of Artificial Sequence: Synthetic oligonucleotide
ggagagccccagcctcacccagg

SEQ ID NO: 4375 - DNA, 23 bp, Artificial Sequence
  Description of Artificial Sequence: Synthetic oligonucleotide
ttgcccatcctgggtgaggctgg

SEQ ID NO: 4376 - DNA, 23 bp, Artificial Sequence
  Description of Artificial Sequence: Synthetic oligonucleotide
tgcccatcctgggtgaggctggg

SEQ ID NO: 4377 - DNA, 23 bp, Artificial Sequence
  Description of Artificial Sequence: Synthetic oligonucleotide
gcccatcctgggtgaggctgggg

SEQ ID NO: 4378 - DNA, 23 bp, Artificial Sequence
  Description of Artificial Sequence: Synthetic oligonucleotide
gggtgaggctggggctctcctgg

SEQ ID NO: 4379 - DNA, 23 bp, Artificial Sequence
  Description of Artificial Sequence: Synthetic oligonucleotide
ggtgaggctggggctctcctggg

SEQ ID NO: 4380 - DNA, 23 bp, Artificial Sequence
  Description of Artificial Sequence: Synthetic oligonucleotide
ccagaatacatacagtgcccagg

SEQ ID NO: 4381 - DNA, 23 bp, Artificial Sequence
  Description of Artificial Sequence: Synthetic oligonucleotide
cctgggcactgtatgtattctgg

SEQ ID NO: 4382 - DNA, 23 bp, Artificial Sequence
  Description of Artificial Sequence: Synthetic oligonucleotide
actgtatgtattctggatacagg

SEQ ID NO: 4383 - DNA, 23 bp, Artificial Sequence
  Description of Artificial Sequence: Synthetic oligonucleotide
ctgtatgtattctggatacaggg

SEQ ID NO: 4384 - DNA, 23 bp, Artificial Sequence
  Description of Artificial Sequence: Synthetic oligonucleotide
tattctggatacagggatactgg

SEQ ID NO: 4385 - DNA, 23 bp, Artificial Sequence
  Description of Artificial Sequence: Synthetic oligonucleotide
attctggatacagggatactggg

SEQ ID NO: 4386 - DNA, 23 bp, Artificial Sequence
  Description of Artificial Sequence: Synthetic oligonucleotide
tactgggctcgctatgtgtgtgg

SEQ ID NO: 4387 - DNA, 23 bp, Artificial Sequence
  Description of Artificial Sequence: Synthetic oligonucleotide
gggctggggcaaggaagggatgg

SEQ ID NO: 4388 - DNA, 23 bp, Artificial Sequence
  Description of Artificial Sequence: Synthetic oligonucleotide
ggtggggctggggcaaggaaggg

SEQ ID NO: 4389 - DNA, 23 bp, Artificial Sequence
  Description of Artificial Sequence: Synthetic oligonucleotide
aggtggggctggggcaaggaagg

SEQ ID NO: 4390 - DNA, 23 bp, Artificial Sequence
  Description of Artificial Sequence: Synthetic oligonucleotide
agggaggtggggctggggcaagg

SEQ ID NO: 4391 - DNA, 23 bp, Artificial Sequence
  Description of Artificial Sequence: Synthetic oligonucleotide
ttgagagggaggtggggctgggg

SEQ ID NO: 4392 - DNA, 23 bp, Artificial Sequence
  Description of Artificial Sequence: Synthetic oligonucleotide
tttgagagggaggtggggctggg

SEQ ID NO: 4393 - DNA, 23 bp, Artificial Sequence
  Description of Artificial Sequence: Synthetic oligonucleotide
gtttgagagggaggtggggctgg

SEQ ID NO: 4394 - DNA, 23 bp, Artificial Sequence
  Description of Artificial Sequence: Synthetic oligonucleotide
gagggtttgagagggaggtgggg

SEQ ID NO: 4395 - DNA, 23 bp, Artificial Sequence
  Description of Artificial Sequence: Synthetic oligonucleotide
agagggtttgagagggaggtggg

SEQ ID NO: 4396 - DNA, 23 bp, Artificial Sequence
  Description of Artificial Sequence: Synthetic oligonucleotide
gagagggtttgagagggaggtgg

SEQ ID NO: 4397 - DNA, 23 bp, Artificial Sequence
  Description of Artificial Sequence: Synthetic oligonucleotide
ccagagagggtttgagagggagg

SEQ ID NO: 4398 - DNA, 23 bp, Artificial Sequence
  Description of Artificial Sequence: Synthetic oligonucleotide
gagccagagagggtttgagaggg

SEQ ID NO: 4399 - DNA, 23 bp, Artificial Sequence
  Description of Artificial Sequence: Synthetic oligonucleotide
agagccagagagggtttgagagg

SEQ ID NO: 4400 - DNA, 23 bp, Artificial Sequence
  Description of Artificial Sequence: Synthetic oligonucleotide
cctccctctcaaaccctctctgg

SEQ ID NO: 4401 - DNA, 23 bp, Artificial Sequence
  Description of Artificial Sequence: Synthetic oligonucleotide
agctcagaaagagccagagaggg

SEQ ID NO: 4402 - DNA, 23 bp, Artificial Sequence
  Description of Artificial Sequence: Synthetic oligonucleotide
aagctcagaaagagccagagagg

SEQ ID NO: 4403 - DNA, 23 bp, Artificial Sequence
  Description of Artificial Sequence: Synthetic oligonucleotide
ggcaagctggggagcaggaaagg

SEQ ID NO: 4404 - DNA, 23 bp, Artificial Sequence
  Description of Artificial Sequence: Synthetic oligonucleotide
cactgggcaagctggggagcagg

SEQ ID NO: 4405 - DNA, 23 bp, Artificial Sequence
  Description of Artificial Sequence: Synthetic oligonucleotide
actgagcactgggcaagctgggg

SEQ ID NO: 4406 - DNA, 23 bp, Artificial Sequence
  Description of Artificial Sequence: Synthetic oligonucleotide
cactgagcactgggcaagctggg

SEQ ID NO: 4407 - DNA, 23 bp, Artificial Sequence
  Description of Artificial Sequence: Synthetic oligonucleotide
gcactgagcactgggcaagctgg

SEQ ID NO: 4408 - DNA, 23 bp, Artificial Sequence
  Description of Artificial Sequence: Synthetic oligonucleotide
caagtggggcactgagcactggg

SEQ ID NO: 4409 - DNA, 23 bp, Artificial Sequence
  Description of Artificial Sequence: Synthetic oligonucleotide
ccaagtggggcactgagcactgg

SEQ ID NO: 4410 - DNA, 23 bp, Artificial Sequence
  Description of Artificial Sequence: Synthetic oligonucleotide
ccagtgctcagtgccccacttgg

SEQ ID NO: 4411 - DNA, 23 bp, Artificial Sequence
  Description of Artificial Sequence: Synthetic oligonucleotide
agtagcaaaagagccaagtgggg

SEQ ID NO: 4412 - DNA, 23 bp, Artificial Sequence
  Description of Artificial Sequence: Synthetic oligonucleotide
aagtagcaaaagagccaagtggg

SEQ ID NO: 4413 - DNA, 23 bp, Artificial Sequence
  Description of Artificial Sequence: Synthetic oligonucleotide
gaagtagcaaaagagccaagtgg

SEQ ID NO: 4414 - DNA, 23 bp, Artificial Sequence
  Description of Artificial Sequence: Synthetic oligonucleotide
acttggctcttttgctacttcgg

SEQ ID NO: 4415 - DNA, 23 bp, Artificial Sequence
  Description of Artificial Sequence: Synthetic oligonucleotide
cttggctcttttgctacttcggg

SEQ ID NO: 4416 - DNA, 23 bp, Artificial Sequence
  Description of Artificial Sequence: Synthetic oligonucleotide
ctcttttgctacttcgggtcagg

SEQ ID NO: 4417 - DNA, 23 bp, Artificial Sequence
  Description of Artificial Sequence: Synthetic oligonucleotide
ttttgctacttcgggtcaggtgg

SEQ ID NO: 4418 - DNA, 23 bp, Artificial Sequence
  Description of Artificial Sequence: Synthetic oligonucleotide
tcgggtcaggtggagcctcttgg

SEQ ID NO: 4419 - DNA, 23 bp, Artificial Sequence
  Description of Artificial Sequence: Synthetic oligonucleotide
cgggtcaggtggagcctcttggg

SEQ ID NO: 4420 - DNA, 23 bp, Artificial Sequence
  Description of Artificial Sequence: Synthetic oligonucleotide
aggcacttcacattcccaagagg

SEQ ID NO: 4421 - DNA, 23 bp, Artificial Sequence
  Description of Artificial Sequence: Synthetic oligonucleotide
tgaagtgcaatctttctgtaagg

SEQ ID NO: 4422 - DNA, 23 bp, Artificial Sequence
  Description of Artificial Sequence: Synthetic oligonucleotide
cagaaagattgcacttcaagagg

SEQ ID NO: 4423 - DNA, 23 bp, Artificial Sequence
  Description of Artificial Sequence: Synthetic oligonucleotide
agattgcacttcaagaggagagg

SEQ ID NO: 4424 - DNA, 23 bp, Artificial Sequence
  Description of Artificial Sequence: Synthetic oligonucleotide
acttcaagaggagaggctgcagg

SEQ ID NO: 4425 - DNA, 23 bp, Artificial Sequence
  Description of Artificial Sequence: Synthetic oligonucleotide
cttcaagaggagaggctgcaggg

SEQ ID NO: 4426 - DNA, 23 bp, Artificial Sequence
  Description of Artificial Sequence: Synthetic oligonucleotide
ccaggcctctgggtttaggatgg

SEQ ID NO: 4427 - DNA, 23 bp, Artificial Sequence
  Description of Artificial Sequence: Synthetic oligonucleotide
agctccaggcctctgggtttagg

SEQ ID NO: 4428 - DNA, 23 bp, Artificial Sequence
  Description of Artificial Sequence: Synthetic oligonucleotide
gggagccatcctaaacccagagg

SEQ ID NO: 4429 - DNA, 23 bp, Artificial Sequence
  Description of Artificial Sequence: Synthetic oligonucleotide
acagtaagctccaggcctctggg

SEQ ID NO: 4430 - DNA, 23 bp, Artificial Sequence
  Description of Artificial Sequence: Synthetic oligonucleotide
ccatcctaaacccagaggcctgg

SEQ ID NO: 4431 - DNA, 23 bp, Artificial Sequence
  Description of Artificial Sequence: Synthetic oligonucleotide
cacagtaagctccaggcctctgg

SEQ ID NO: 4432 - DNA, 23 bp, Artificial Sequence
  Description of Artificial Sequence: Synthetic oligonucleotide
aaagtgacacagtaagctccagg

SEQ ID NO: 4433 - DNA, 23 bp, Artificial Sequence
  Description of Artificial Sequence: Synthetic oligonucleotide
gtcactttacttttgtacacagg

SEQ ID NO: 4434 - DNA, 23 bp, Artificial Sequence
  Description of Artificial Sequence: Synthetic oligonucleotide
tcactttacttttgtacacaggg

SEQ ID NO: 4435 - DNA, 23 bp, Artificial Sequence
  Description of Artificial Sequence: Synthetic oligonucleotide
cactttacttttgtacacagggg

SEQ ID NO: 4436 - DNA, 23 bp, Artificial Sequence
  Description of Artificial Sequence: Synthetic oligonucleotide
aatccttctcgagggcactaagg

SEQ ID NO: 4437 - DNA, 23 bp, Artificial Sequence
  Description of Artificial Sequence: Synthetic oligonucleotide
tctccttagtgccctcgagaagg

SEQ ID NO: 4438 - DNA, 23 bp, Artificial Sequence
  Description of Artificial Sequence: Synthetic oligonucleotide
gggccaagaatccttctcgaggg

SEQ ID NO: 4439 - DNA, 23 bp, Artificial Sequence
  Description of Artificial Sequence: Synthetic oligonucleotide
agggccaagaatccttctcgagg

SEQ ID NO: 4440 - DNA, 23 bp, Artificial Sequence
  Description of Artificial Sequence: Synthetic oligonucleotide
gtgccctcgagaaggattcttgg

SEQ ID NO: 4441 - DNA, 23 bp, Artificial Sequence
  Description of Artificial Sequence: Synthetic oligonucleotide
gcctcaggagtagaagctcaggg

SEQ ID NO: 4442 - DNA, 23 bp, Artificial Sequence
  Description of Artificial Sequence: Synthetic oligonucleotide
ggcctcaggagtagaagctcagg

SEQ ID NO: 4443 - DNA, 23 bp, Artificial Sequence
  Description of Artificial Sequence: Synthetic oligonucleotide
gccctgagcttctactcctgagg

SEQ ID NO: 4444 - DNA, 23 bp, Artificial Sequence
  Description of Artificial Sequence: Synthetic oligonucleotide
ggctgcacagaggtggcctcagg

SEQ ID NO: 4445 - DNA, 23 bp, Artificial Sequence
  Description of Artificial Sequence: Synthetic oligonucleotide
gagctggggctgcacagaggtgg

SEQ ID NO: 4446 - DNA, 23 bp, Artificial Sequence
  Description of Artificial Sequence: Synthetic oligonucleotide
agggagctggggctgcacagagg

SEQ ID NO: 4447 - DNA, 23 bp, Artificial Sequence
  Description of Artificial Sequence: Synthetic oligonucleotide
gcctagagttgagggagctgggg

SEQ ID NO: 4448 - DNA, 23 bp, Artificial Sequence
  Description of Artificial Sequence: Synthetic oligonucleotide
agcctagagttgagggagctggg

SEQ ID NO: 4449 - DNA, 23 bp, Artificial Sequence
  Description of Artificial Sequence: Synthetic oligonucleotide
cagcctagagttgagggagctgg

SEQ ID NO: 4450 - DNA, 23 bp, Artificial Sequence
  Description of Artificial Sequence: Synthetic oligonucleotide
agactacagcctagagttgaggg

SEQ ID NO: 4451 - DNA, 23 bp, Artificial Sequence
  Description of Artificial Sequence: Synthetic oligonucleotide
gagactacagcctagagttgagg

SEQ ID NO: 4452 - DNA, 23 bp, Artificial Sequence
  Description of Artificial Sequence: Synthetic oligonucleotide
gccccagctccctcaactctagg

SEQ ID NO: 4453 - DNA, 23 bp, Artificial Sequence
  Description of Artificial Sequence: Synthetic oligonucleotide
actctaggctgtagtctcagtgg

SEQ ID NO: 4454 - DNA, 23 bp, Artificial Sequence
  Description of Artificial Sequence: Synthetic oligonucleotide
ctctaggctgtagtctcagtggg

SEQ ID NO: 4455 - DNA, 23 bp, Artificial Sequence
  Description of Artificial Sequence: Synthetic oligonucleotide
gtagtctcagtgggaaagcctgg

SEQ ID NO: 4456 - DNA, 23 bp, Artificial Sequence
  Description of Artificial Sequence: Synthetic oligonucleotide
ctcagtgggaaagcctggcttgg

SEQ ID NO: 4457 - DNA, 23 bp, Artificial Sequence
  Description of Artificial Sequence: Synthetic oligonucleotide
tcagtgggaaagcctggcttggg

SEQ ID NO: 4458 - DNA, 23 bp, Artificial Sequence
  Description of Artificial Sequence: Synthetic oligonucleotide
cagtgggaaagcctggcttgggg

SEQ ID NO: 4459 - DNA, 23 bp, Artificial Sequence
  Description of Artificial Sequence: Synthetic oligonucleotide
tcctaggagacccccaagccagg

SEQ ID NO: 4460 - DNA, 23 bp, Artificial Sequence
  Description of Artificial Sequence: Synthetic oligonucleotide
agtgggaaagcctggcttggggg

SEQ ID NO: 4461 - DNA, 23 bp, Artificial Sequence
  Description of Artificial Sequence: Synthetic oligonucleotide
gcctggcttgggggtctcctagg

SEQ ID NO: 4462 - DNA, 23 bp, Artificial Sequence
  Description of Artificial Sequence: Synthetic oligonucleotide
gccttcaggtggacattcctagg

SEQ ID NO: 4463 - DNA, 23 bp, Artificial Sequence
  Description of Artificial Sequence: Synthetic oligonucleotide
tcctaggaatgtccacctgaagg

SEQ ID NO: 4464 - DNA, 23 bp, Artificial Sequence
  Description of Artificial Sequence: Synthetic oligonucleotide
ctatcaagtgtgccttcaggtgg

SEQ ID NO: 4465 - DNA, 23 bp, Artificial Sequence
  Description of Artificial Sequence: Synthetic oligonucleotide
cccctatcaagtgtgccttcagg

SEQ ID NO: 4466 - DNA, 23 bp, Artificial Sequence
  Description of Artificial Sequence: Synthetic oligonucleotide
cacctgaaggcacacttgatagg

SEQ ID NO: 4467 - DNA, 23 bp, Artificial Sequence
  Description of Artificial Sequence: Synthetic oligonucleotide
acctgaaggcacacttgataggg

SEQ ID NO: 4468 - DNA, 23 bp, Artificial Sequence
  Description of Artificial Sequence: Synthetic oligonucleotide
cctgaaggcacacttgatagggg

SEQ ID NO: 4469 - DNA, 23 bp, Artificial Sequence
  Description of Artificial Sequence: Synthetic oligonucleotide
tgcacaacttatgtctgccaagg

SEQ ID NO: 4470 - DNA, 23 bp, Artificial Sequence
  Description of Artificial Sequence: Synthetic oligonucleotide
gggagttcctcaggtggccttgg

SEQ ID NO: 4471 - DNA, 23 bp, Artificial Sequence
  Description of Artificial Sequence: Synthetic oligonucleotide
atgtctgccaaggccacctgagg

SEQ ID NO: 4472 - DNA, 23 bp, Artificial Sequence
  Description of Artificial Sequence: Synthetic oligonucleotide
gcaccagggagttcctcaggtgg

SEQ ID NO: 4473 - DNA, 23 bp, Artificial Sequence
  Description of Artificial Sequence: Synthetic oligonucleotide
taggcaccagggagttcctcagg

SEQ ID NO: 4474 - DNA, 23 bp, Artificial Sequence
  Description of Artificial Sequence: Synthetic oligonucleotide
aggccacctgaggaactccctgg

SEQ ID NO: 4475 - DNA, 23 bp, Artificial Sequence
  Description of Artificial Sequence: Synthetic oligonucleotide
ggtggaacttataggcaccaggg

SEQ ID NO: 4476 - DNA, 23 bp, Artificial Sequence
  Description of Artificial Sequence: Synthetic oligonucleotide
aggtggaacttataggcaccagg

SEQ ID NO: 4477 - DNA, 23 bp, Artificial Sequence
  Description of Artificial Sequence: Synthetic oligonucleotide
aaggggaaggtggaacttatagg

SEQ ID NO: 4478 - DNA, 23 bp, Artificial Sequence
  Description of Artificial Sequence: Synthetic oligonucleotide
gaggaagaggaaggggaaggtgg

SEQ ID NO: 4479 - DNA, 23 bp, Artificial Sequence
  Description of Artificial Sequence: Synthetic oligonucleotide
ggcgaggaagaggaaggggaagg

SEQ ID NO: 4480 - DNA, 23 bp, Artificial Sequence
  Description of Artificial Sequence: Synthetic oligonucleotide
ctggggcgaggaagaggaagggg

SEQ ID NO: 4481 - DNA, 23 bp, Artificial Sequence
  Description of Artificial Sequence: Synthetic oligonucleotide
gctggggcgaggaagaggaaggg

SEQ ID NO: 4482 - DNA, 23 bp, Artificial Sequence
  Description of Artificial Sequence: Synthetic oligonucleotide
tgctggggcgaggaagaggaagg

SEQ ID NO: 4483 - DNA, 23 bp, Artificial Sequence
  Description of Artificial Sequence: Synthetic oligonucleotide
aaaatgctggggcgaggaagagg

SEQ ID NO: 4484 - DNA, 23 bp, Artificial Sequence
  Description of Artificial Sequence: Synthetic oligonucleotide
tcagaaaaaatgctggggcgagg

SEQ ID NO: 4485 - DNA, 23 bp, Artificial Sequence
  Description of Artificial Sequence: Synthetic oligonucleotide
cctactcagaaaaaatgctgggg

SEQ ID NO: 4486 - DNA, 23 bp, Artificial Sequence
  Description of Artificial Sequence: Synthetic oligonucleotide
ccctactcagaaaaaatgctggg

SEQ ID NO: 4487 - DNA, 23 bp, Artificial Sequence
  Description of Artificial Sequence: Synthetic oligonucleotide
cccctactcagaaaaaatgctgg

SEQ ID NO: 4488 - DNA, 23 bp, Artificial Sequence
  Description of Artificial Sequence: Synthetic oligonucleotide
ccccagcattttttctgagtagg

SEQ ID NO: 4489 - DNA, 23 bp, Artificial Sequence
  Description of Artificial Sequence: Synthetic oligonucleotide
cccagcattttttctgagtaggg

SEQ ID NO: 4490 - DNA, 23 bp, Artificial Sequence
  Description of Artificial Sequence: Synthetic oligonucleotide
ccagcattttttctgagtagggg

SEQ ID NO: 4491 - DNA, 23 bp, Artificial Sequence
  Description of Artificial Sequence: Synthetic oligonucleotide
gcattttttctgagtaggggtgg

SEQ ID NO: 4492 - DNA, 23 bp, Artificial Sequence
  Description of Artificial Sequence: Synthetic oligonucleotide
tttctgagtaggggtggcaatgg

SEQ ID NO: 4493 - DNA, 23 bp, Artificial Sequence
  Description of Artificial Sequence: Synthetic oligonucleotide
ttctgagtaggggtggcaatggg

SEQ ID NO: 4494 - DNA, 23 bp, Artificial Sequence
  Description of Artificial Sequence: Synthetic oligonucleotide
cctgcaactgcttatgacaatgg

SEQ ID NO: 4495 - DNA, 23 bp, Artificial Sequence
  Description of Artificial Sequence: Synthetic oligonucleotide
ccattgtcataagcagttgcagg

SEQ ID NO: 4496 - DNA, 23 bp, Artificial Sequence
  Description of Artificial Sequence: Synthetic oligonucleotide
gaaagaaaacacaaggtgtcagg

SEQ ID NO: 4497 - DNA, 23 bp, Artificial Sequence
  Description of Artificial Sequence: Synthetic oligonucleotide
aagtcattgcagacctgtttagg

SEQ ID NO: 4498 - DNA, 23 bp, Artificial Sequence
  Description of Artificial Sequence: Synthetic oligonucleotide
cttgggggtaaggcctaaacagg

SEQ ID NO: 4499 - DNA, 23 bp, Artificial Sequence
  Description of Artificial Sequence: Synthetic oligonucleotide
cttgggcttgcttgggggtaagg

SEQ ID NO: 4500 - DNA, 23 bp, Artificial Sequence
  Description of Artificial Sequence: Synthetic oligonucleotide
gcaggcttgggcttgcttggggg

SEQ ID NO: 4501 - DNA, 23 bp, Artificial Sequence
  Description of Artificial Sequence: Synthetic oligonucleotide
ggcaggcttgggcttgcttgggg

SEQ ID NO: 4502 - DNA, 23 bp, Artificial Sequence
  Description of Artificial Sequence: Synthetic oligonucleotide
tggcaggcttgggcttgcttggg

SEQ ID NO: 4503 - DNA, 23 bp, Artificial Sequence
  Description of Artificial Sequence: Synthetic oligonucleotide
atggcaggcttgggcttgcttgg

SEQ ID NO: 4504 - DNA, 23 bp, Artificial Sequence
  Description of Artificial Sequence: Synthetic oligonucleotide
atacagcagatggcaggcttggg

SEQ ID NO: 4505 - DNA, 23 bp, Artificial Sequence
  Description of Artificial Sequence: Synthetic oligonucleotide
tatacagcagatggcaggcttgg

SEQ ID NO: 4506 - DNA, 23 bp, Artificial Sequence
  Description of Artificial Sequence: Synthetic oligonucleotide
atctatatacagcagatggcagg

SEQ ID NO: 4507 - DNA, 23 bp, Artificial Sequence
  Description of Artificial Sequence: Synthetic oligonucleotide
tcttatctatatacagcagatgg

SEQ ID NO: 4508 - DNA, 23 bp, Artificial Sequence
  Description of Artificial Sequence: Synthetic oligonucleotide
gtatatagataagaacatcatgg

SEQ ID NO: 4509 - DNA, 23 bp, Artificial Sequence
  Description of Artificial Sequence: Synthetic oligonucleotide
atggtgcagtaaaagaagcctgg

SEQ ID NO: 4510 - DNA, 23 bp, Artificial Sequence
  Description of Artificial Sequence: Synthetic oligonucleotide
agtaaaagaagcctggcctttgg

SEQ ID NO: 4511 - DNA, 23 bp, Artificial Sequence
  Description of Artificial Sequence: Synthetic oligonucleotide
ctgttctgactccaaaggccagg

SEQ ID NO: 4512 - DNA, 23 bp, Artificial Sequence
  Description of Artificial Sequence: Synthetic oligonucleotide
ccctgctgttctgactccaaagg

SEQ ID NO: 4513 - DNA, 23 bp, Artificial Sequence
  Description of Artificial Sequence: Synthetic oligonucleotide
gcctttggagtcagaacagcagg

SEQ ID NO: 4514 - DNA, 23 bp, Artificial Sequence
  Description of Artificial Sequence: Synthetic oligonucleotide
cctttggagtcagaacagcaggg

SEQ ID NO: 4515 - DNA, 23 bp, Artificial Sequence
  Description of Artificial Sequence: Synthetic oligonucleotide
gtcagaacagcagggtgacttgg

SEQ ID NO: 4516 - DNA, 23 bp, Artificial Sequence
  Description of Artificial Sequence: Synthetic oligonucleotide
tcagaacagcagggtgacttggg

SEQ ID NO: 4517 - DNA, 23 bp, Artificial Sequence
  Description of Artificial Sequence: Synthetic oligonucleotide
cagaacagcagggtgacttgggg

SEQ ID NO: 4518 - DNA, 23 bp, Artificial Sequence
  Description of Artificial Sequence: Synthetic oligonucleotide
agaaggaaatggggtgctctggg

SEQ ID NO: 4519 - DNA, 23 bp, Artificial Sequence
  Description of Artificial Sequence: Synthetic oligonucleotide
gagaaggaaatggggtgctctgg

SEQ ID NO: 4520 - DNA, 23 bp, Artificial Sequence
  Description of Artificial Sequence: Synthetic oligonucleotide
atcttacagagaaggaaatgggg

SEQ ID NO: 4521 - DNA, 23 bp, Artificial Sequence
  Description of Artificial Sequence: Synthetic oligonucleotide
catcttacagagaaggaaatggg

SEQ ID NO: 4522 - DNA, 23 bp, Artificial Sequence
  Description of Artificial Sequence: Synthetic oligonucleotide
tcatcttacagagaaggaaatgg

SEQ ID NO: 4523 - DNA, 23 bp, Artificial Sequence
  Description of Artificial Sequence: Synthetic oligonucleotide
ttatcctcatcttacagagaagg

SEQ ID NO: 4524 - DNA, 23 bp, Artificial Sequence
  Description of Artificial Sequence: Synthetic oligonucleotide
atttccttctctgtaagatgagg

SEQ ID NO: 4525 - DNA, 23 bp, Artificial Sequence
  Description of Artificial Sequence: Synthetic oligonucleotide
aataagagtaacaaccttttagg

SEQ ID NO: 4526 - DNA, 23 bp, Artificial Sequence
  Description of Artificial Sequence: Synthetic oligonucleotide
ataagagtaacaaccttttaggg

SEQ ID NO: 4527 - DNA, 23 bp, Artificial Sequence
  Description of Artificial Sequence: Synthetic oligonucleotide
aaactcaccttaaccctaaaagg

SEQ ID NO: 4528 - DNA, 23 bp, Artificial Sequence
  Description of Artificial Sequence: Synthetic oligonucleotide
gtaacaaccttttagggttaagg

SEQ ID NO: 4529 - DNA, 23 bp, Artificial Sequence
  Description of Artificial Sequence: Synthetic oligonucleotide
ttaaggtgagttttcagcttagg

SEQ ID NO: 4530 - DNA, 23 bp, Artificial Sequence
  Description of Artificial Sequence: Synthetic oligonucleotide
agttttcagcttaggaagtctgg

SEQ ID NO: 4531 - DNA, 23 bp, Artificial Sequence
  Description of Artificial Sequence: Synthetic oligonucleotide
gttttcagcttaggaagtctggg

SEQ ID NO: 4532 - DNA, 23 bp, Artificial Sequence
  Description of Artificial Sequence: Synthetic oligonucleotide
gaagtctgggaatattgcaaagg

SEQ ID NO: 4533 - DNA, 23 bp, Artificial Sequence
  Description of Artificial Sequence: Synthetic oligonucleotide
aagtctgggaatattgcaaaggg

SEQ ID NO: 4534 - DNA, 23 bp, Artificial Sequence
  Description of Artificial Sequence: Synthetic oligonucleotide
tgggaatattgcaaagggcttgg

SEQ ID NO: 4535 - DNA, 23 bp, Artificial Sequence
  Description of Artificial Sequence: Synthetic oligonucleotide
aatattgcaaagggcttggcagg

SEQ ID NO: 4536 - DNA, 23 bp, Artificial Sequence
  Description of Artificial Sequence: Synthetic oligonucleotide
aagggcttggcaggaacccatgg

SEQ ID NO: 4537 - DNA, 23 bp, Artificial Sequence
  Description of Artificial Sequence: Synthetic oligonucleotide
cttggcaggaacccatggtgagg

SEQ ID NO: 4538 - DNA, 23 bp, Artificial Sequence
  Description of Artificial Sequence: Synthetic oligonucleotide
tggaactagatcctcaccatggg

SEQ ID NO: 4539 - DNA, 23 bp, Artificial Sequence
  Description of Artificial Sequence: Synthetic oligonucleotide
ttggaactagatcctcaccatgg

SEQ ID NO: 4540 - DNA, 23 bp, Artificial Sequence
  Description of Artificial Sequence: Synthetic oligonucleotide
gttttctgtacctatcaacttgg

SEQ ID NO: 4541 - DNA, 23 bp, Artificial Sequence
  Description of Artificial Sequence: Synthetic oligonucleotide
ggatctagttccaagttgatagg

SEQ ID NO: 4542 - DNA, 23 bp, Artificial Sequence
  Description of Artificial Sequence: Synthetic oligonucleotide
ggtacagaaaaccagaacatcgg

SEQ ID NO: 4543 - DNA, 23 bp, Artificial Sequence
  Description of Artificial Sequence: Synthetic oligonucleotide
ttactcaaggcccgatgttctgg

SEQ ID NO: 4544 - DNA, 23 bp, Artificial Sequence
  Description of Artificial Sequence: Synthetic oligonucleotide
gtacagaaaaccagaacatcggg

SEQ ID NO: 4545 - DNA, 23 bp, Artificial Sequence
  Description of Artificial Sequence: Synthetic oligonucleotide
gaaacttcactctttactcaagg

SEQ ID NO: 4546 - DNA, 23 bp, Artificial Sequence
  Description of Artificial Sequence: Synthetic oligonucleotide
tgcacatagcaggtgctttgtgg

SEQ ID NO: 4547 - DNA, 23 bp, Artificial Sequence
  Description of Artificial Sequence: Synthetic oligonucleotide
catgctctcctgcacatagcagg

SEQ ID NO: 4548 - DNA, 23 bp, Artificial Sequence
  Description of Artificial Sequence: Synthetic oligonucleotide
acaaagcacctgctatgtgcagg

SEQ ID NO: 4549 - DNA, 23 bp, Artificial Sequence
  Description of Artificial Sequence: Synthetic oligonucleotide
ctgctatgtgcaggagagcatgg

SEQ ID NO: 4550 - DNA, 23 bp, Artificial Sequence
  Description of Artificial Sequence: Synthetic oligonucleotide
gtgcaggagagcatggcagaagg

SEQ ID NO: 4551 - DNA, 23 bp, Artificial Sequence
  Description of Artificial Sequence: Synthetic oligonucleotide
caggagagcatggcagaaggagg

SEQ ID NO: 4552 - DNA, 23 bp, Artificial Sequence
  Description of Artificial Sequence: Synthetic oligonucleotide
catggcagaaggaggctgcttgg

SEQ ID NO: 4553 - DNA, 23 bp, Artificial Sequence
  Description of Artificial Sequence: Synthetic oligonucleotide
agaaggaggctgcttggccctgg

SEQ ID NO: 4554 - DNA, 23 bp, Artificial Sequence
  Description of Artificial Sequence: Synthetic oligonucleotide
tgtcagaatctcaaggaccaggg

SEQ ID NO: 4555 - DNA, 23 bp, Artificial Sequence
  Description of Artificial Sequence: Synthetic oligonucleotide
ctgtcagaatctcaaggaccagg

SEQ ID NO: 4556 - DNA, 23 bp, Artificial Sequence
  Description of Artificial Sequence: Synthetic oligonucleotide
aggacactgtcagaatctcaagg

SEQ ID NO: 4557 - DNA, 23 bp, Artificial Sequence
  Description of Artificial Sequence: Synthetic oligonucleotide
agatctccccatgtctgtctagg

SEQ ID NO: 4558 - DNA, 23 bp, Artificial Sequence
  Description of Artificial Sequence: Synthetic oligonucleotide
gacagtgtcctagacagacatgg

SEQ ID NO: 4559 - DNA, 23 bp, Artificial Sequence
  Description of Artificial Sequence: Synthetic oligonucleotide
acagtgtcctagacagacatggg

SEQ ID NO: 4560 - DNA, 23 bp, Artificial Sequence
  Description of Artificial Sequence: Synthetic oligonucleotide
cagtgtcctagacagacatgggg

SEQ ID NO: 4561 - DNA, 23 bp, Artificial Sequence
  Description of Artificial Sequence: Synthetic oligonucleotide
agaagttggtaacgtcaaatagg

1. A method of preventing, ameliorating, or treating a disease associated with a gene mutation or single-nucleotide polymorphism (SNP) in a subject, comprising
administering to the subject an engineered CRISPR/Cas9 system comprising at least one vector comprising
(i) a nucleotide molecule encoding Cas9 nuclease;
(ii) a first sgRNA comprising a first CRISPR targeting RNA (crRNA) sequence that hybridizes to a nucleotide sequence complementary to a first target sequence, the first target sequence being adjacent to the 5′-end of a first protospacer adjacent motif (PAM) at 3′-end side of a disease-causing mutation or SNP in cis, wherein the first target sequence or the first PAM comprises a first ancestral variation or SNP site; and
(iii) a second sgRNA comprising a second crRNA sequence that hybridizes to a nucleotide sequence complementary to a second target sequence, the second target sequence being adjacent to the 5′-end of a second PAM at 5′-end side of the disease-causing mutation or SNP in cis, wherein the second target sequence or the second PAM comprises a second ancestral variation or SNP site,
wherein the at least one vector does not have a nucleotide molecule encoding Cas9 nuclease and a crRNA sequence that naturally occur together.

2. The method according to claim 1, wherein the disease is an autosomal dominant disease.

3. The method according to claim 1, wherein the disease is selected from the group consisting of Acropectoral syndrome, Acute intermittent porphyria, Adermatoglyphia, Albright's hereditary osteodystrophy, Arakawa's syndrome II, Aromatase excess syndrome, Autosomal dominant cerebellar ataxia, Axenfeld syndrome, Benign hereditary chorea, Bethlem myopathy, Birt-Hogg-Dubé syndrome, Boomerang dysplasia, Branchio-oto-renal syndrome, Buschke-Ollendorff syndrome, Camurati-Engelmann disease, Central core disease, Collagen disease, Collagenopathy, types II and XI, Congenital distal spinal muscular atrophy, Congenital stromal corneal dystrophy, Costello syndrome, Currarino syndrome, Darier's disease, Glut1 deficiency, Dentatorubral-pallidoluysian atrophy, Dermatopathia pigmentosa reticularis, Dysfibrinogenemia, Transthyretin-related hereditary amyloidosis, Familial atrial fibrillation, Familial hypercholesterolemia, Familial male-limited precocious puberty, Feingold syndrome, Felty's syndrome, Flynn-Aird syndrome, Gardner's syndrome, Gillespie syndrome, Gray platelet syndrome, Greig cephalopolysyndactyly syndrome, Hajdu-Cheney syndrome, Hawkinsinuria, Hay-Wells syndrome, Hereditary elliptocytosis, Hereditary hemorrhagic telangiectasia, Hereditary mucoepithelial dysplasia, Hereditary spherocytosis, Holt-Oram syndrome, Huntington's disease, Huntington's disease-like syndrome, Hypertrophic cardiomyopathy, Hypoalphalipoproteinemia, Hypochondroplasia, Hypodysfibrinogenemia, Jackson-Weiss syndrome, Keratolytic winter erythema, Kniest dysplasia, Kostmann syndrome, Langer-Giedion syndrome, Larsen syndrome, Liddle's syndrome, Marfan syndrome, Marshall syndrome, Medullary cystic kidney disease, Metachondromatosis, Miller-Dieker syndrome, MOMO syndrome, Monilethrix, MonoMAC, Multiple endocrine neoplasia, Multiple endocrine neoplasia type 1, Multiple endocrine neoplasia type 2, Multiple endocrine neoplasia type 2b, Myelokathexis, Myotonic dystrophy, Naegeli-Franceschetti-Jadassohn syndrome, Nail-patella syndrome, Noonan syndrome, Oculopharyngeal muscular dystrophy, Pachyonychia congenital, Pallister-Hall syndrome, PAPA syndrome, Papillorenal syndrome, Parastremmatic dwarfism, Pelger-Huet anomaly, Peutz-Jeghers syndrome, Piebaldism, Platyspondylic lethal skeletal dysplasia, Torrance type, Polydactyly, Popliteal pterygium syndrome, Porphyria cutanea tarda, Pseudoachondroplasia, RASopathy, Reis-Bucklers corneal dystrophy, Romano-Ward syndrome, Rosselli-Gulienetti syndrome, Roussy-Levy syndrome, Rubinstein-Taybi syndrome, Saethre-Chotzen syndrome, Schmitt Gillenwater Kelly syndrome, Short QT syndrome, Singleton Merten syndrome, Spinal muscular atrophy with lower extremity predominance, Spinocerebellar ataxia, Spinocerebellar ataxia type 1, Spinocerebellar ataxia type 6, Spondyloepimetaphyseal dysplasia-Strudwick type, Spondyloepiphyseal dysplasia congenital, Spondyloperipheral dysplasia, Stickler syndrome, Tietz syndrome, Timothy syndrome, Treacher Collins syndrome, Tricho-dento-osseous syndrome, Tuberous sclerosis, Upington disease, Variegate porphyria, Vitelliform macular dystrophy, Von Hippel-Lindau disease, Von Willebrand disease, Wallis-Zieff-Goldblatt syndrome, WHIM syndrome, White sponge nevus, Worth syndrome, Zaspopathy, Zimmermann-Laband syndrome, and Zori-Stalker-Williams syndrome.

4. The method according to claim 1, wherein the disease is an autosomal dominant disease of an eye.

5. The method according to claim 1, wherein the disease excludes corneal dystrophy.

6. The method according to claim 1, wherein the disease-causing mutation or SNP is in an exon of a gene causing the disease.

7. The method according to claim 1, wherein the first and second PAMs are in different introns surrounding one or more exons containing the disease-causing mutation or SNP.

8. The method according to claim 1, wherein the first PAM comprises the first ancestral variation or SNP site and/or the second PAM comprises the second ancestral variation or SNP site.

9. The method according to claim 1, wherein
the first crRNA sequence comprises the first target sequence;
the second crRNA sequence comprises the second target sequence;
the first crRNA sequence is from 17 to 24 nucleotide long; and/or
the second crRNA sequence is from 17 to 24 nucleotide long.

10. The method according to claim 1, wherein the first and/or second PAMs and the Cas9 nuclease are from Streptococcus or Staphylococcus.

11. The method according to claim 1, wherein the first and second PAMs are both from Streptococcus or Staphylococcus.

12. The method according to claim 1, wherein each of the first and second PAMs independently consists of NGG or NNGRRT, wherein N is any of A, T, G, and C, and R is A or G.

13. The method according to claim 1, wherein the administering comprises injecting the engineered CRISPR/Cas9 system into the subject.

14. The method according to claim 1, wherein the administering comprises introducing the engineered CRISPR/Cas9 system into a cell containing and expressing a DNA molecule having the target sequence.

15. The method according to claim 1, wherein
the disease is associated with the SNP;
the first target sequence or the first PAM comprises the first ancestral SNP site; and/or
the second target sequence or the second PAM comprises the second ancestral SNP site.

16. The method according to claim 1, wherein the target sequence or the PAM comprises a plurality of mutation or SNP sites.

17. The method according to claim 1, wherein the subject is human.

18. The method according to claim 1, further comprising:
prior to administering to the subject the engineered CRISPR/Cas9 system:
obtaining sequence information of the subject; and
selecting the first crRNA sequence and/or the second crRNA sequence based on the sequence information of the subject.

19. The method of claim 18, wherein:
the sequence information of the subject includes whole-genome sequence information of the subject.

20. The method according to claim 1, wherein:
the first crRNA sequence hybridizes to the nucleotide sequence so that the Cas9 nuclease cleaves at a first cleaving site that is adjacent to the first ancestral variation or SNP site; and/or
the second crRNA sequence hybridizes to the nucleotide sequence so that the Cas9 nuclease cleaves at a second cleaving site that is adjacent to the second ancestral variation or SNP site.

21. The method according to claim 20, wherein:
the first crRNA sequence hybridizes to the nucleotide sequence so that the Cas9 nuclease cleaves only at the first cleaving site that is adjacent to the first ancestral variation or SNP site; and/or
the second crRNA sequence hybridizes to the nucleotide sequence so that the Cas9 nuclease cleaves only at the second cleaving site that is adjacent to the second ancestral variation or SNP site.

22. The method according to claim 1, wherein:
the first crRNA sequence hybridizes to the nucleotide sequence complementary to the first target sequence in trans with the disease-causing mutation or SNP, said first target sequence in trans not being adjacent to the 5′-end of a PAM; and/or
the second crRNA sequence hybridizes to the nucleotide sequence complementary to the second target sequence in trans with the disease-causing mutation or SNP, said second target sequence in trans not being adjacent to the 5′-end of a PAM.

23. The method according to claim 1, wherein:
the first crRNA sequence hybridizes to the nucleotide sequence complementary to the first target sequence in trans with the disease-causing mutation or SNP, said first target sequence in trans not being adjacent to the 5′-end of a PAM; and
the second crRNA sequence hybridizes to the nucleotide sequence complementary to the second target sequence in trans with the disease-causing mutation or SNP, said second target sequence in trans being adjacent to the 5′-end of a PAM.

24. The method according to claim 1, wherein:
the first crRNA sequence hybridizes to the nucleotide sequence complementary to the first target sequence in trans with the disease-causing mutation or SNP, said first target sequence in trans being adjacent to the 5′-end of a PAM; and
the second crRNA sequence hybridizes to the nucleotide sequence complementary to the second target sequence in trans with the disease-causing mutation or SNP, said second target sequence in trans not being adjacent to the 5′-end of a PAM.
